United States Patent Application Publication US 2005/0266417 A1 - sequence listing, part 2

SEQ ID NO: 28393 - DNA, 16 bp, Artificial
  oligonucleotide probe
caggggaagggtcgga

SEQ ID NO: 28394 - DNA, 16 bp, Artificial
  oligonucleotide probe
gcctagcgcctcgacg

SEQ ID NO: 28395 - DNA, 16 bp, Artificial
  oligonucleotide probe
gcctagcgcctcgacg

SEQ ID NO: 28396 - DNA, 16 bp, Artificial
  oligonucleotide probe
caccgggtggtcagcg

SEQ ID NO: 28397 - DNA, 16 bp, Artificial
  oligonucleotide probe
caccgggtggtcagcg

SEQ ID NO: 28398 - DNA, 16 bp, Artificial
  oligonucleotide probe
caccgcgaggtcacgc

SEQ ID NO: 28399 - DNA, 16 bp, Artificial
  oligonucleotide probe
caccgcgaggtcacgc

SEQ ID NO: 28400 - DNA, 16 bp, Artificial
  oligonucleotide probe
tggcgtgggggtccaa

SEQ ID NO: 28401 - DNA, 16 bp, Artificial
  oligonucleotide probe
tggcgtgggggtccaa

SEQ ID NO: 28402 - DNA, 16 bp, Artificial
  oligonucleotide probe
caccgacgggaaacgc

SEQ ID NO: 28403 - DNA, 16 bp, Artificial
  oligonucleotide probe
caccgacgggaaacgc

SEQ ID NO: 28404 - DNA, 16 bp, Artificial
  oligonucleotide probe
acgcggaagacgtggc

SEQ ID NO: 28405 - DNA, 16 bp, Artificial
  oligonucleotide probe
acgcggaagacgtggc

SEQ ID NO: 28406 - DNA, 16 bp, Artificial
  oligonucleotide probe
caccgacgggaaacgc

SEQ ID NO: 28407 - DNA, 16 bp, Artificial
  oligonucleotide probe
caccgacgggaaacgc

SEQ ID NO: 28408 - DNA, 16 bp, Artificial
  oligonucleotide probe
gacggcgagtgggcag

SEQ ID NO: 28409 - DNA, 16 bp, Artificial
  oligonucleotide probe
gacggcgagtgggcag

SEQ ID NO: 28410 - DNA, 16 bp, Artificial
  oligonucleotide probe
cctcgcctcgaggagc

SEQ ID NO: 28411 - DNA, 16 bp, Artificial
  oligonucleotide probe
cctcgcctcgaggagc

SEQ ID NO: 28412 - DNA, 16 bp, Artificial
  oligonucleotide probe
gcagcggagcctgagc

SEQ ID NO: 28413 - DNA, 16 bp, Artificial
  oligonucleotide probe
gcagcggagcctgagc

SEQ ID NO: 28414 - DNA, 16 bp, Artificial
  oligonucleotide probe
acgcggtccaccgtgg

SEQ ID NO: 28415 - DNA, 16 bp, Artificial
  oligonucleotide probe
acgcggtccaccgtgg

SEQ ID NO: 28416 - DNA, 16 bp, Artificial
  oligonucleotide probe
acgcgagcgggtgcag

SEQ ID NO: 28417 - DNA, 16 bp, Artificial
  oligonucleotide probe
acgcgagcgggtgcag

SEQ ID NO: 28418 - DNA, 16 bp, Artificial
  oligonucleotide probe
caccgcgaggtcacgc

SEQ ID NO: 28419 - DNA, 16 bp, Artificial
  oligonucleotide probe
caccgcgaggtcacgc

SEQ ID NO: 28420 - DNA, 16 bp, Artificial
  oligonucleotide probe
ggaagcctgcgacgga

SEQ ID NO: 28421 - DNA, 16 bp, Artificial
  oligonucleotide probe
ggaagcctgcgacgga

SEQ ID NO: 28422 - DNA, 16 bp, Artificial
  oligonucleotide probe
cgagcggaggtcccaa

SEQ ID NO: 28423 - DNA, 16 bp, Artificial
  oligonucleotide probe
cgagcggaggtcccaa

SEQ ID NO: 28424 - DNA, 16 bp, Artificial
  oligonucleotide probe
gtccgagcagcggcct

SEQ ID NO: 28425 - DNA, 16 bp, Artificial
  oligonucleotide probe
gtccgagcagcggcct

SEQ ID NO: 28426 - DNA, 16 bp, Artificial
  oligonucleotide probe
gacggggtcggacgag

SEQ ID NO: 28427 - DNA, 16 bp, Artificial
  oligonucleotide probe
gacggggtcggacgag

SEQ ID NO: 28428 - DNA, 16 bp, Artificial
  oligonucleotide probe
gcagcaccagcgtggc

SEQ ID NO: 28429 - DNA, 16 bp, Artificial
  oligonucleotide probe
gcagcaccagcgtggc

SEQ ID NO: 28430 - DNA, 16 bp, Artificial
  oligonucleotide probe
tgctgggtgcaggcga

SEQ ID NO: 28431 - DNA, 16 bp, Artificial
  oligonucleotide probe
tgctgggtgcaggcga

SEQ ID NO: 28432 - DNA, 16 bp, Artificial
  oligonucleotide probe
tggcgcctgtccgtgg

SEQ ID NO: 28433 - DNA, 16 bp, Artificial
  oligonucleotide probe
tggcgcctgtccgtgg

SEQ ID NO: 28434 - DNA, 16 bp, Artificial
  oligonucleotide probe
gagcgcgacacccagg

SEQ ID NO: 28435 - DNA, 16 bp, Artificial
  oligonucleotide probe
gagcgcgacacccagg

SEQ ID NO: 28436 - DNA, 16 bp, Artificial
  oligonucleotide probe
caggagcgggaagcga

SEQ ID NO: 28437 - DNA, 16 bp, Artificial
  oligonucleotide probe
caggagcgggaagcga

SEQ ID NO: 28438 - DNA, 16 bp, Artificial
  oligonucleotide probe
gcctcggagacggcag

SEQ ID NO: 28439 - DNA, 16 bp, Artificial
  oligonucleotide probe
gcctcggagacggcag

SEQ ID NO: 28440 - DNA, 16 bp, Artificial
  oligonucleotide probe
ggaagcctgcgacgga

SEQ ID NO: 28441 - DNA, 16 bp, Artificial
  oligonucleotide probe
ggaagcctgcgacgga

SEQ ID NO: 28442 - DNA, 16 bp, Artificial
  oligonucleotide probe
caccgacgggaaacgc

SEQ ID NO: 28443 - DNA, 16 bp, Artificial
  oligonucleotide probe
caccgacgggaaacgc

SEQ ID NO: 28444 - DNA, 16 bp, Artificial
  oligonucleotide probe
ggaagcctgcgacgga

SEQ ID NO: 28445 - DNA, 16 bp, Artificial
  oligonucleotide probe
ggaagcctgcgacgga

SEQ ID NO: 28446 - DNA, 16 bp, Artificial
  oligonucleotide probe
gagcgcgacacccagg

SEQ ID NO: 28447 - DNA, 16 bp, Artificial
  oligonucleotide probe
gagcgcgacacccagg

SEQ ID NO: 28448 - DNA, 16 bp, Artificial
  oligonucleotide probe
tggcacgcgagccagg

SEQ ID NO: 28449 - DNA, 16 bp, Artificial
  oligonucleotide probe
tggcacgcgagccagg

SEQ ID NO: 28450 - DNA, 16 bp, Artificial
  oligonucleotide probe
agcggtccgcgagagc

SEQ ID NO: 28451 - DNA, 16 bp, Artificial
  oligonucleotide probe
agcggtccgcgagagc

SEQ ID NO: 28452 - DNA, 16 bp, Artificial
  oligonucleotide probe
gacggcgagtgggcag

SEQ ID NO: 28453 - DNA, 16 bp, Artificial
  oligonucleotide probe
gacggcgagtgggcag

SEQ ID NO: 28454 - DNA, 16 bp, Artificial
  oligonucleotide probe
gtccggaagtgggcga

SEQ ID NO: 28455 - DNA, 16 bp, Artificial
  oligonucleotide probe
gtccggaagtgggcga

SEQ ID NO: 28456 - DNA, 16 bp, Artificial
  oligonucleotide probe
acgcgcctgacgcctc

SEQ ID NO: 28457 - DNA, 16 bp, Artificial
  oligonucleotide probe
acgcgcctgacgcctc

SEQ ID NO: 28458 - DNA, 16 bp, Artificial
  oligonucleotide probe
accacggaagcgcgga

SEQ ID NO: 28459 - DNA, 16 bp, Artificial
  oligonucleotide probe
accacggaagcgcgga

SEQ ID NO: 28460 - DNA, 16 bp, Artificial
  oligonucleotide probe
gcaggcagccaatggc

SEQ ID NO: 28461 - DNA, 16 bp, Artificial
  oligonucleotide probe
gcaggcagccaatggc

SEQ ID NO: 28462 - DNA, 16 bp, Artificial
  oligonucleotide probe
tggcacgcgagccagg

SEQ ID NO: 28463 - DNA, 16 bp, Artificial
  oligonucleotide probe
tggcacgcgagccagg

SEQ ID NO: 28464 - DNA, 16 bp, Artificial
  oligonucleotide probe
gacggacgacgcgtgg

SEQ ID NO: 28465 - DNA, 16 bp, Artificial
  oligonucleotide probe
gacggacgacgcgtgg

SEQ ID NO: 28466 - DNA, 16 bp, Artificial
  oligonucleotide probe
gagcgcgacacccagg

SEQ ID NO: 28467 - DNA, 16 bp, Artificial
  oligonucleotide probe
gagcgcgacacccagg

SEQ ID NO: 28468 - DNA, 16 bp, Artificial
  oligonucleotide probe
acgccaggcgaggtgg

SEQ ID NO: 28469 - DNA, 16 bp, Artificial
  oligonucleotide probe
acgccaggcgaggtgg

SEQ ID NO: 28470 - DNA, 16 bp, Artificial
  oligonucleotide probe
ggaaagcggcctggaa

SEQ ID NO: 28471 - DNA, 16 bp, Artificial
  oligonucleotide probe
ggaaagcggcctggaa

SEQ ID NO: 28472 - DNA, 16 bp, Artificial
  oligonucleotide probe
agcggtccgcgagagc

SEQ ID NO: 28473 - DNA, 16 bp, Artificial
  oligonucleotide probe
agcggtccgcgagagc

SEQ ID NO: 28474 - DNA, 16 bp, Artificial
  oligonucleotide probe
gacggcgagtgggcag

SEQ ID NO: 28475 - DNA, 16 bp, Artificial
  oligonucleotide probe
gacggcgagtgggcag

SEQ ID NO: 28476 - DNA, 16 bp, Artificial
  oligonucleotide probe
acgcgcctgacgcctc

SEQ ID NO: 28477 - DNA, 16 bp, Artificial
  oligonucleotide probe
acgcgcctgacgcctc

SEQ ID NO: 28478 - DNA, 16 bp, Artificial
  oligonucleotide probe
acgcggtccaccgtgg

SEQ ID NO: 28479 - DNA, 16 bp, Artificial
  oligonucleotide probe
acgcggtccaccgtgg

SEQ ID NO: 28480 - DNA, 16 bp, Artificial
  oligonucleotide probe
gcctcggagacggcag

SEQ ID NO: 28481 - DNA, 16 bp, Artificial
  oligonucleotide probe
gcctcggagacggcag

SEQ ID NO: 28482 - DNA, 16 bp, Artificial
  oligonucleotide probe
caccgacgggaaacgc

SEQ ID NO: 28483 - DNA, 16 bp, Artificial
  oligonucleotide probe
caccgacgggaaacgc

SEQ ID NO: 28484 - DNA, 16 bp, Artificial
  oligonucleotide probe
gcctgcgagagctggc

SEQ ID NO: 28485 - DNA, 16 bp, Artificial
  oligonucleotide probe
gcctgcgagagctggc

SEQ ID NO: 28486 - DNA, 16 bp, Artificial
  oligonucleotide probe
caccgcgaggtcacgc

SEQ ID NO: 28487 - DNA, 16 bp, Artificial
  oligonucleotide probe
caccgcgaggtcacgc

SEQ ID NO: 28488 - DNA, 16 bp, Artificial
  oligonucleotide probe
acgcaccagtcccgga

SEQ ID NO: 28489 - DNA, 16 bp, Artificial
  oligonucleotide probe
acgcaccagtcccgga

SEQ ID NO: 28490 - DNA, 16 bp, Artificial
  oligonucleotide probe
gacggggtcggacgag

SEQ ID NO: 28491 - DNA, 16 bp, Artificial
  oligonucleotide probe
gacggggtcggacgag

SEQ ID NO: 28492 - DNA, 16 bp, Artificial
  oligonucleotide probe
tgctcggatgctgcga

SEQ ID NO: 28493 - DNA, 16 bp, Artificial
  oligonucleotide probe
tgctcggatgctgcga

SEQ ID NO: 28494 - DNA, 16 bp, Artificial
  oligonucleotide probe
caggggaagggtcgga

SEQ ID NO: 28495 - DNA, 16 bp, Artificial
  oligonucleotide probe
caggggaagggtcgga

SEQ ID NO: 28496 - DNA, 16 bp, Artificial
  oligonucleotide probe
caggggaagggtcgga

SEQ ID NO: 28497 - DNA, 16 bp, Artificial
  oligonucleotide probe
caggggaagggtcgga

SEQ ID NO: 28498 - DNA, 16 bp, Artificial
  oligonucleotide probe
cctcagcgcggaacca

SEQ ID NO: 28499 - DNA, 16 bp, Artificial
  oligonucleotide probe
cctcagcgcggaacca

SEQ ID NO: 28500 - DNA, 16 bp, Artificial
  oligonucleotide probe
accatggcacgcgacg

SEQ ID NO: 28501 - DNA, 16 bp, Artificial
  oligonucleotide probe
accatggcacgcgacg

SEQ ID NO: 28502 - DNA, 16 bp, Artificial
  oligonucleotide probe
gtccacgctggcgacg

SEQ ID NO: 28503 - DNA, 16 bp, Artificial
  oligonucleotide probe
gtccacgctggcgacg

SEQ ID NO: 28504 - DNA, 16 bp, Artificial
  oligonucleotide probe
gcctgtgggtccgcga

SEQ ID NO: 28505 - DNA, 16 bp, Artificial
  oligonucleotide probe
gcctgtgggtccgcga

SEQ ID NO: 28506 - DNA, 16 bp, Artificial
  oligonucleotide probe
gcctagcgcctcgacg

SEQ ID NO: 28507 - DNA, 16 bp, Artificial
  oligonucleotide probe
gcctagcgcctcgacg

SEQ ID NO: 28508 - DNA, 16 bp, Artificial
  oligonucleotide probe
acgcaccagtcccgga

SEQ ID NO: 28509 - DNA, 16 bp, Artificial
  oligonucleotide probe
acgcaccagtcccgga

SEQ ID NO: 28510 - DNA, 16 bp, Artificial
  oligonucleotide probe
ggaaagcggcctggaa

SEQ ID NO: 28511 - DNA, 16 bp, Artificial
  oligonucleotide probe
ggaaagcggcctggaa

SEQ ID NO: 28512 - DNA, 16 bp, Artificial
  oligonucleotide probe
gagcggtctggcggaa

SEQ ID NO: 28513 - DNA, 16 bp, Artificial
  oligonucleotide probe
gagcggtctggcggaa

SEQ ID NO: 28514 - DNA, 16 bp, Artificial
  oligonucleotide probe
acgcgcctgacgcctc

SEQ ID NO: 28515 - DNA, 16 bp, Artificial
  oligonucleotide probe
acgcgcctgacgcctc

SEQ ID NO: 28516 - DNA, 16 bp, Artificial
  oligonucleotide probe
tcacgccttggccacc

SEQ ID NO: 28517 - DNA, 16 bp, Artificial
  oligonucleotide probe
tcacgccttggccacc

SEQ ID NO: 28518 - DNA, 16 bp, Artificial
  oligonucleotide probe
gtccacgctggcgacg

SEQ ID NO: 28519 - DNA, 16 bp, Artificial
  oligonucleotide probe
gtccacgctggcgacg

SEQ ID NO: 28520 - DNA, 16 bp, Artificial
  oligonucleotide probe
acgcgagcgggtgcag

SEQ ID NO: 28521 - DNA, 16 bp, Artificial
  oligonucleotide probe
acgcgagcgggtgcag

SEQ ID NO: 28522 - DNA, 16 bp, Artificial
  oligonucleotide probe
gtccgagcagcggcct

SEQ ID NO: 28523 - DNA, 16 bp, Artificial
  oligonucleotide probe
gtccgagcagcggcct

SEQ ID NO: 28524 - DNA, 16 bp, Artificial
  oligonucleotide probe
gagcgcctcctcgagc

SEQ ID NO: 28525 - DNA, 16 bp, Artificial
  oligonucleotide probe
gagcgcctcctcgagc

SEQ ID NO: 28526 - DNA, 16 bp, Artificial
  oligonucleotide probe
gtccgagcagcggcct

SEQ ID NO: 28527 - DNA, 16 bp, Artificial
  oligonucleotide probe
gtccgagcagcggcct

SEQ ID NO: 28528 - DNA, 16 bp, Artificial
  oligonucleotide probe
gacggagcacgccgga

SEQ ID NO: 28529 - DNA, 16 bp, Artificial
  oligonucleotide probe
gacggagcacgccgga

SEQ ID NO: 28530 - DNA, 16 bp, Artificial
  oligonucleotide probe
gacggcgagtgggcag

SEQ ID NO: 28531 - DNA, 16 bp, Artificial
  oligonucleotide probe
gacggcgagtgggcag

SEQ ID NO: 28532 - DNA, 16 bp, Artificial
  oligonucleotide probe
tggcagcgggtcgtgg

SEQ ID NO: 28533 - DNA, 16 bp, Artificial
  oligonucleotide probe
tggcagcgggtcgtgg

SEQ ID NO: 28534 - DNA, 16 bp, Artificial
  oligonucleotide probe
caccgggtggtcagcg

SEQ ID NO: 28535 - DNA, 16 bp, Artificial
  oligonucleotide probe
caccgggtggtcagcg

SEQ ID NO: 28536 - DNA, 16 bp, Artificial
  oligonucleotide probe
gcctgcgagagctggc

SEQ ID NO: 28537 - DNA, 16 bp, Artificial
  oligonucleotide probe
gcctgcgagagctggc

SEQ ID NO: 28538 - DNA, 16 bp, Artificial
  oligonucleotide probe
gcctagcgcctcgacg

SEQ ID NO: 28539 - DNA, 16 bp, Artificial
  oligonucleotide probe
gcctagcgcctcgacg

SEQ ID NO: 28540 - DNA, 16 bp, Artificial
  oligonucleotide probe
gacgcaggcggagggt

SEQ ID NO: 28541 - DNA, 16 bp, Artificial
  oligonucleotide probe
gacgcaggcggagggt

SEQ ID NO: 28542 - DNA, 16 bp, Artificial
  oligonucleotide probe
caccgacgggaaacgc

SEQ ID NO: 28543 - DNA, 16 bp, Artificial
  oligonucleotide probe
caccgacgggaaacgc

SEQ ID NO: 28544 - DNA, 16 bp, Artificial
  oligonucleotide probe
gtgggacgacgcgcga

SEQ ID NO: 28545 - DNA, 16 bp, Artificial
  oligonucleotide probe
gtgggacgacgcgcga

SEQ ID NO: 28546 - DNA, 16 bp, Artificial
  oligonucleotide probe
gacggcgagtgggcag

SEQ ID NO: 28547 - DNA, 16 bp, Artificial
  oligonucleotide probe
gacggcgagtgggcag

SEQ ID NO: 28548 - DNA, 16 bp, Artificial
  oligonucleotide probe
tggccaggcggagtgg

SEQ ID NO: 28549 - DNA, 16 bp, Artificial
  oligonucleotide probe
tggccaggcggagtgg

SEQ ID NO: 28550 - DNA, 16 bp, Artificial
  oligonucleotide probe
gcctagcgcctcgacg

SEQ ID NO: 28551 - DNA, 16 bp, Artificial
  oligonucleotide probe
gcctagcgcctcgacg

SEQ ID NO: 28552 - DNA, 16 bp, Artificial
  oligonucleotide probe
gacgcaggcggagggt

SEQ ID NO: 28553 - DNA, 16 bp, Artificial
  oligonucleotide probe
gacgcaggcggagggt

SEQ ID NO: 28554 - DNA, 16 bp, Artificial
  oligonucleotide probe
tggcagcgggtcgtgg

SEQ ID NO: 28555 - DNA, 16 bp, Artificial
  oligonucleotide probe
tggcagcgggtcgtgg

SEQ ID NO: 28556 - DNA, 16 bp, Artificial
  oligonucleotide probe
tggcgtgggggtccaa

SEQ ID NO: 28557 - DNA, 16 bp, Artificial
  oligonucleotide probe
tggcgtgggggtccaa

SEQ ID NO: 28558 - DNA, 16 bp, Artificial
  oligonucleotide probe
gcagcctctggccgag

SEQ ID NO: 28559 - DNA, 16 bp, Artificial
  oligonucleotide probe
gcagcctctggccgag

SEQ ID NO: 28560 - DNA, 16 bp, Artificial
  oligonucleotide probe
gtccggaagtgggcga

SEQ ID NO: 28561 - DNA, 16 bp, Artificial
  oligonucleotide probe
gtccggaagtgggcga

SEQ ID NO: 28562 - DNA, 16 bp, Artificial
  oligonucleotide probe
acgcgcctgacgcctc

SEQ ID NO: 28563 - DNA, 16 bp, Artificial
  oligonucleotide probe
acgcgcctgacgcctc

SEQ ID NO: 28564 - DNA, 16 bp, Artificial
  oligonucleotide probe
accatggcacgcgacg

SEQ ID NO: 28565 - DNA, 16 bp, Artificial
  oligonucleotide probe
accatggcacgcgacg

SEQ ID NO: 28566 - DNA, 16 bp, Artificial
  oligonucleotide probe
gacggcgagtgggcag

SEQ ID NO: 28567 - DNA, 16 bp, Artificial
  oligonucleotide probe
gacggcgagtgggcag

SEQ ID NO: 28568 - DNA, 16 bp, Artificial
  oligonucleotide probe
gcaggcagccaatggc

SEQ ID NO: 28569 - DNA, 16 bp, Artificial
  oligonucleotide probe
gcaggcagccaatggc

SEQ ID NO: 28570 - DNA, 16 bp, Artificial
  oligonucleotide probe
gcgacgagcgagccaa

SEQ ID NO: 28571 - DNA, 16 bp, Artificial
  oligonucleotide probe
gcgacgagcgagccaa

SEQ ID NO: 28572 - DNA, 16 bp, Artificial
  oligonucleotide probe
gcagcctctggccgag

SEQ ID NO: 28573 - DNA, 16 bp, Artificial
  oligonucleotide probe
gcagcctctggccgag

SEQ ID NO: 28574 - DNA, 16 bp, Artificial
  oligonucleotide probe
caccgggtggtcagcg

SEQ ID NO: 28575 - DNA, 16 bp, Artificial
  oligonucleotide probe
caccgggtggtcagcg

SEQ ID NO: 28576 - DNA, 16 bp, Artificial
  oligonucleotide probe
tcacgccttggccacc

SEQ ID NO: 28577 - DNA, 16 bp, Artificial
  oligonucleotide probe
tcacgccttggccacc

SEQ ID NO: 28578 - DNA, 16 bp, Artificial
  oligonucleotide probe
accatggcacgcgacg

SEQ ID NO: 28579 - DNA, 16 bp, Artificial
  oligonucleotide probe
accatggcacgcgacg

SEQ ID NO: 28580 - DNA, 16 bp, Artificial
  oligonucleotide probe
ggaagcctgcgacgga

SEQ ID NO: 28581 - DNA, 16 bp, Artificial
  oligonucleotide probe
ggaagcctgcgacgga

SEQ ID NO: 28582 - DNA, 16 bp, Artificial
  oligonucleotide probe
gagcggtctggcggaa

SEQ ID NO: 28583 - DNA, 16 bp, Artificial
  oligonucleotide probe
gagcggtctggcggaa

SEQ ID NO: 28584 - DNA, 16 bp, Artificial
  oligonucleotide probe
caccgggtggtcagcg

SEQ ID NO: 28585 - DNA, 16 bp, Artificial
  oligonucleotide probe
caccgggtggtcagcg

SEQ ID NO: 28586 - DNA, 16 bp, Artificial
  oligonucleotide probe
ccaaagcgggaatggc

SEQ ID NO: 28587 - DNA, 16 bp, Artificial
  oligonucleotide probe
ccaaagcgggaatggc

SEQ ID NO: 28588 - DNA, 16 bp, Artificial
  oligonucleotide probe
tggccaggcggagtgg

SEQ ID NO: 28589 - DNA, 16 bp, Artificial
  oligonucleotide probe
tggccaggcggagtgg

SEQ ID NO: 28590 - DNA, 16 bp, Artificial
  oligonucleotide probe
ggaagcctgcgacgga

SEQ ID NO: 28591 - DNA, 16 bp, Artificial
  oligonucleotide probe
ggaagcctgcgacgga

SEQ ID NO: 28592 - DNA, 16 bp, Artificial
  oligonucleotide probe
acgcgcctgacgcctc

SEQ ID NO: 28593 - DNA, 16 bp, Artificial
  oligonucleotide probe
acgcgcctgacgcctc

SEQ ID NO: 28594 - DNA, 16 bp, Artificial
  oligonucleotide probe
gcaggcagccaatggc

SEQ ID NO: 28595 - DNA, 16 bp, Artificial
  oligonucleotide probe
gcaggcagccaatggc

SEQ ID NO: 28596 - DNA, 16 bp, Artificial
  oligonucleotide probe
tggcgtgggggtccaa

SEQ ID NO: 28597 - DNA, 16 bp, Artificial
  oligonucleotide probe
tggcgtgggggtccaa

SEQ ID NO: 28598 - DNA, 16 bp, Artificial
  oligonucleotide probe
tcacgccttggccacc

SEQ ID NO: 28599 - DNA, 16 bp, Artificial
  oligonucleotide probe
tcacgccttggccacc

SEQ ID NO: 28600 - DNA, 16 bp, Artificial
  oligonucleotide probe
gtccgagcagcggcct

SEQ ID NO: 28601 - DNA, 16 bp, Artificial
  oligonucleotide probe
gtccgagcagcggcct

SEQ ID NO: 28602 - DNA, 16 bp, Artificial
  oligonucleotide probe
ggaagcctgcgacgga

SEQ ID NO: 28603 - DNA, 16 bp, Artificial
  oligonucleotide probe
ggaagcctgcgacgga

SEQ ID NO: 28604 - DNA, 16 bp, Artificial
  oligonucleotide probe
gtccgagcagcggcct

SEQ ID NO: 28605 - DNA, 16 bp, Artificial
  oligonucleotide probe
gtccgagcagcggcct

SEQ ID NO: 28606 - DNA, 16 bp, Artificial
  oligonucleotide probe
tggccaggcggagtgg

SEQ ID NO: 28607 - DNA, 16 bp, Artificial
  oligonucleotide probe
tggccaggcggagtgg

SEQ ID NO: 28608 - DNA, 16 bp, Artificial
  oligonucleotide probe
gcaggcagccaatggc

SEQ ID NO: 28609 - DNA, 16 bp, Artificial
  oligonucleotide probe
gcaggcagccaatggc

SEQ ID NO: 28610 - DNA, 16 bp, Artificial
  oligonucleotide probe
tggcggtcgcctcgag

SEQ ID NO: 28611 - DNA, 16 bp, Artificial
  oligonucleotide probe
tggcggtcgcctcgag

SEQ ID NO: 28612 - DNA, 16 bp, Artificial
  oligonucleotide probe
acgccaggcgaggtgg

SEQ ID NO: 28613 - DNA, 16 bp, Artificial
  oligonucleotide probe
acgccaggcgaggtgg

SEQ ID NO: 28614 - DNA, 16 bp, Artificial
  oligonucleotide probe
cggagcgagtggggaa

SEQ ID NO: 28615 - DNA, 16 bp, Artificial
  oligonucleotide probe
cggagcgagtggggaa

SEQ ID NO: 28616 - DNA, 16 bp, Artificial
  oligonucleotide probe
acgcgcctgacgcctc

SEQ ID NO: 28617 - DNA, 16 bp, Artificial
  oligonucleotide probe
acgcgcctgacgcctc

SEQ ID NO: 28618 - DNA, 16 bp, Artificial
  oligonucleotide probe
ggtcgacgacgccgag

SEQ ID NO: 28619 - DNA, 16 bp, Artificial
  oligonucleotide probe
ggtcgacgacgccgag

SEQ ID NO: 28620 - DNA, 16 bp, Artificial
  oligonucleotide probe
acgcgggtcaccgtcc

SEQ ID NO: 28621 - DNA, 16 bp, Artificial
  oligonucleotide probe
acgcgggtcaccgtcc

SEQ ID NO: 28622 - DNA, 16 bp, Artificial
  oligonucleotide probe
gacggcgagtgggcag

SEQ ID NO: 28623 - DNA, 16 bp, Artificial
  oligonucleotide probe
gacggcgagtgggcag

SEQ ID NO: 28624 - DNA, 16 bp, Artificial
  oligonucleotide probe
gcagcggagcctgagc

SEQ ID NO: 28625 - DNA, 16 bp, Artificial
  oligonucleotide probe
gcagcggagcctgagc

SEQ ID NO: 28626 - DNA, 16 bp, Artificial
  oligonucleotide probe
gggtggaacgaggcga

SEQ ID NO: 28627 - DNA, 16 bp, Artificial
  oligonucleotide probe
gggtggaacgaggcga

SEQ ID NO: 28628 - DNA, 16 bp, Artificial
  oligonucleotide probe
acgcgcctgacgcctc

SEQ ID NO: 28629 - DNA, 16 bp, Artificial
  oligonucleotide probe
acgcgcctgacgcctc

SEQ ID NO: 28630 - DNA, 16 bp, Artificial
  oligonucleotide probe
gacgcaggcggagggt

SEQ ID NO: 28631 - DNA, 16 bp, Artificial
  oligonucleotide probe
gacgcaggcggagggt

SEQ ID NO: 28632 - DNA, 16 bp, Artificial
  oligonucleotide probe
gtccacgctggcgacg

SEQ ID NO: 28633 - DNA, 16 bp, Artificial
  oligonucleotide probe
gtccacgctggcgacg

SEQ ID NO: 28634 - DNA, 16 bp, Artificial
  oligonucleotide probe
gcgatggccaggtggc

SEQ ID NO: 28635 - DNA, 16 bp, Artificial
  oligonucleotide probe
gcgatggccaggtggc

SEQ ID NO: 28636 - DNA, 16 bp, Artificial
  oligonucleotide probe
cgaggacgccaaacgc

SEQ ID NO: 28637 - DNA, 16 bp, Artificial
  oligonucleotide probe
cgaggacgccaaacgc

SEQ ID NO: 28638 - DNA, 16 bp, Artificial
  oligonucleotide probe
caccgacgggaaacgc

SEQ ID NO: 28639 - DNA, 16 bp, Artificial
  oligonucleotide probe
caccgacgggaaacgc

SEQ ID NO: 28640 - DNA, 16 bp, Artificial
  oligonucleotide probe
caccgggtggtcagcg

SEQ ID NO: 28641 - DNA, 16 bp, Artificial
  oligonucleotide probe
caccgggtggtcagcg

SEQ ID NO: 28642 - DNA, 16 bp, Artificial
  oligonucleotide probe
gacgcaggcggagggt

SEQ ID NO: 28643 - DNA, 16 bp, Artificial
  oligonucleotide probe
gacgcaggcggagggt

SEQ ID NO: 28644 - DNA, 16 bp, Artificial
  oligonucleotide probe
gtccacgctggcgacg

SEQ ID NO: 28645 - DNA, 16 bp, Artificial
  oligonucleotide probe
gtccacgctggcgacg

SEQ ID NO: 28646 - DNA, 16 bp, Artificial
  oligonucleotide probe
acgcgggtcaccgtcc

SEQ ID NO: 28647 - DNA, 16 bp, Artificial
  oligonucleotide probe
acgcgggtcaccgtcc

SEQ ID NO: 28648 - DNA, 16 bp, Artificial
  oligonucleotide probe
gagcgcgacacccagg

SEQ ID NO: 28649 - DNA, 16 bp, Artificial
  oligonucleotide probe
gagcgcgacacccagg

SEQ ID NO: 28650 - DNA, 16 bp, Artificial
  oligonucleotide probe
cggacaggacgctggc

SEQ ID NO: 28651 - DNA, 16 bp, Artificial
  oligonucleotide probe
cggacaggacgctggc

SEQ ID NO: 28652 - DNA, 16 bp, Artificial
  oligonucleotide probe
gacgcaggcggagggt

SEQ ID NO: 28653 - DNA, 16 bp, Artificial
  oligonucleotide probe
gacgcaggcggagggt

SEQ ID NO: 28654 - DNA, 16 bp, Artificial
  oligonucleotide probe
caccgacgggaaacgc

SEQ ID NO: 28655 - DNA, 16 bp, Artificial
  oligonucleotide probe
caccgacgggaaacgc

SEQ ID NO: 28656 - DNA, 16 bp, Artificial
  oligonucleotide probe
cctctggctggcccaa

SEQ ID NO: 28657 - DNA, 16 bp, Artificial
  oligonucleotide probe
cctctggctggcccaa

SEQ ID NO: 28658 - DNA, 16 bp, Artificial
  oligonucleotide probe
gtccggaagtgggcga

SEQ ID NO: 28659 - DNA, 16 bp, Artificial
  oligonucleotide probe
gtccggaagtgggcga

SEQ ID NO: 28660 - DNA, 16 bp, Artificial
  oligonucleotide probe
gcagcaccagcgtggc

SEQ ID NO: 28661 - DNA, 16 bp, Artificial
  oligonucleotide probe
gcagcaccagcgtggc

SEQ ID NO: 28662 - DNA, 16 bp, Artificial
  oligonucleotide probe
caccgacgggaaacgc

SEQ ID NO: 28663 - DNA, 16 bp, Artificial
  oligonucleotide probe
caccgacgggaaacgc

SEQ ID NO: 28664 - DNA, 16 bp, Artificial
  oligonucleotide probe
gcgatggccaggtggc

SEQ ID NO: 28665 - DNA, 16 bp, Artificial
  oligonucleotide probe
gcgatggccaggtggc

SEQ ID NO: 28666 - DNA, 16 bp, Artificial
  oligonucleotide probe
gtgggggtgcagggaa

SEQ ID NO: 28667 - DNA, 16 bp, Artificial
  oligonucleotide probe
gtgggggtgcagggaa

SEQ ID NO: 28668 - DNA, 16 bp, Artificial
  oligonucleotide probe
acgccaggcgaggtgg

SEQ ID NO: 28669 - DNA, 16 bp, Artificial
  oligonucleotide probe
acgccaggcgaggtgg

SEQ ID NO: 28670 - DNA, 16 bp, Artificial
  oligonucleotide probe
caccgcgaggtcacgc

SEQ ID NO: 28671 - DNA, 16 bp, Artificial
  oligonucleotide probe
caccgcgaggtcacgc

SEQ ID NO: 28672 - DNA, 16 bp, Artificial
  oligonucleotide probe
gcctagcgcctcgacg

SEQ ID NO: 28673 - DNA, 16 bp, Artificial
  oligonucleotide probe
gcctagcgcctcgacg

SEQ ID NO: 28674 - DNA, 16 bp, Artificial
  oligonucleotide probe
ccaaagcgggaatggc

SEQ ID NO: 28675 - DNA, 16 bp, Artificial
  oligonucleotide probe
ccaaagcgggaatggc

SEQ ID NO: 28676 - DNA, 16 bp, Artificial
  oligonucleotide probe
cggacaggacgctggc

SEQ ID NO: 28677 - DNA, 16 bp, Artificial
  oligonucleotide probe
cggacaggacgctggc

SEQ ID NO: 28678 - DNA, 16 bp, Artificial
  oligonucleotide probe
caggcctccctcgcga

SEQ ID NO: 28679 - DNA, 16 bp, Artificial
  oligonucleotide probe
caggcctccctcgcga

SEQ ID NO: 28680 - DNA, 16 bp, Artificial
  oligonucleotide probe
acgcgcctgacgcctc

SEQ ID NO: 28681 - DNA, 16 bp, Artificial
  oligonucleotide probe
acgcgcctgacgcctc

SEQ ID NO: 28682 - DNA, 16 bp, Artificial
  oligonucleotide probe
agcgccaatcacgggt

SEQ ID NO: 28683 - DNA, 16 bp, Artificial
  oligonucleotide probe
agcgccaatcacgggt

SEQ ID NO: 28684 - DNA, 16 bp, Artificial
  oligonucleotide probe
acgcgcctgacgcctc

SEQ ID NO: 28685 - DNA, 16 bp, Artificial
  oligonucleotide probe
acgcgcctgacgcctc

SEQ ID NO: 28686 - DNA, 16 bp, Artificial
  oligonucleotide probe
gcagcaccagcgtggc

SEQ ID NO: 28687 - DNA, 16 bp, Artificial
  oligonucleotide probe
gcagcaccagcgtggc

SEQ ID NO: 28688 - DNA, 16 bp, Artificial
  oligonucleotide probe
cctcagcgcggaacca

SEQ ID NO: 28689 - DNA, 16 bp, Artificial
  oligonucleotide probe
cctcagcgcggaacca

SEQ ID NO: 28690 - DNA, 16 bp, Artificial
  oligonucleotide probe
gcagcctctggccgag

SEQ ID NO: 28691 - DNA, 16 bp, Artificial
  oligonucleotide probe
gcagcctctggccgag

SEQ ID NO: 28692 - DNA, 16 bp, Artificial
  oligonucleotide probe
accacggaagcgcgga

SEQ ID NO: 28693 - DNA, 16 bp, Artificial
  oligonucleotide probe
accacggaagcgcgga

SEQ ID NO: 28694 - DNA, 16 bp, Artificial
  oligonucleotide probe
caggagcgggaagcga

SEQ ID NO: 28695 - DNA, 16 bp, Artificial
  oligonucleotide probe
caggagcgggaagcga

SEQ ID NO: 28696 - DNA, 16 bp, Artificial
  oligonucleotide probe
acgccaggcgaggtgg

SEQ ID NO: 28697 - DNA, 16 bp, Artificial
  oligonucleotide probe
acgccaggcgaggtgg

SEQ ID NO: 28698 - DNA, 16 bp, Artificial
  oligonucleotide probe
gtggcggaggtcggaa

SEQ ID NO: 28699 - DNA, 16 bp, Artificial
  oligonucleotide probe
gtggcggaggtcggaa

SEQ ID NO: 28700 - DNA, 16 bp, Artificial
  oligonucleotide probe
acgcaccagtcccgga

SEQ ID NO: 28701 - DNA, 16 bp, Artificial
  oligonucleotide probe
acgcaccagtcccgga

SEQ ID NO: 28702 - DNA, 16 bp, Artificial
  oligonucleotide probe
gtggcaggagcgacgc

SEQ ID NO: 28703 - DNA, 16 bp, Artificial
  oligonucleotide probe
gtggcaggagcgacgc

SEQ ID NO: 28704 - DNA, 16 bp, Artificial
  oligonucleotide probe
gcaggcagccaatggc

SEQ ID NO: 28705 - DNA, 16 bp, Artificial
  oligonucleotide probe
gcaggcagccaatggc

SEQ ID NO: 28706 - DNA, 16 bp, Artificial
  oligonucleotide probe
gagcgcgacacccagg

SEQ ID NO: 28707 - DNA, 16 bp, Artificial
  oligonucleotide probe
gagcgcgacacccagg

SEQ ID NO: 28708 - DNA, 16 bp, Artificial
  oligonucleotide probe
gggttggccgagtggc

SEQ ID NO: 28709 - DNA, 16 bp, Artificial
  oligonucleotide probe
gggttggccgagtggc

SEQ ID NO: 28710 - DNA, 16 bp, Artificial
  oligonucleotide probe
gggttggccgagtggc

SEQ ID NO: 28711 - DNA, 16 bp, Artificial
  oligonucleotide probe
gggttggccgagtggc

SEQ ID NO: 28712 - DNA, 16 bp, Artificial
  oligonucleotide probe
gtggcggaggtcggaa

SEQ ID NO: 28713 - DNA, 16 bp, Artificial
  oligonucleotide probe
gtggcggaggtcggaa

SEQ ID NO: 28714 - DNA, 16 bp, Artificial
  oligonucleotide probe
caccgcgaggtcacgc

SEQ ID NO: 28715 - DNA, 16 bp, Artificial
  oligonucleotide probe
caccgcgaggtcacgc

SEQ ID NO: 28716 - DNA, 16 bp, Artificial
  oligonucleotide probe
acgcggtccaccgtgg

SEQ ID NO: 28717 - DNA, 16 bp, Artificial
  oligonucleotide probe
acgcggtccaccgtgg

SEQ ID NO: 28718 - DNA, 16 bp, Artificial
  oligonucleotide probe
ggaagcctgcgacgga

SEQ ID NO: 28719 - DNA, 16 bp, Artificial
  oligonucleotide probe
ggaagcctgcgacgga

SEQ ID NO: 28720 - DNA, 16 bp, Artificial
  oligonucleotide probe
gtggcaggagcgacgc

SEQ ID NO: 28721 - DNA, 16 bp, Artificial
  oligonucleotide probe
gtggcaggagcgacgc

SEQ ID NO: 28722 - DNA, 16 bp, Artificial
  oligonucleotide probe
acgcgagcgggtgcag

SEQ ID NO: 28723 - DNA, 16 bp, Artificial
  oligonucleotide probe
acgcgagcgggtgcag

SEQ ID NO: 28724 - DNA, 16 bp, Artificial
  oligonucleotide probe
accacggaagcgcgga

SEQ ID NO: 28725 - DNA, 16 bp, Artificial
  oligonucleotide probe
accacggaagcgcgga

SEQ ID NO: 28726 - DNA, 16 bp, Artificial
  oligonucleotide probe
cctcagcgcggaacca

SEQ ID NO: 28727 - DNA, 16 bp, Artificial
  oligonucleotide probe
cctcagcgcggaacca

SEQ ID NO: 28728 - DNA, 16 bp, Artificial
  oligonucleotide probe
acgcggaagacgtggc

SEQ ID NO: 28729 - DNA, 16 bp, Artificial
  oligonucleotide probe
acgcggaagacgtggc

SEQ ID NO: 28730 - DNA, 16 bp, Artificial
  oligonucleotide probe
gtccggaagtgggcga

SEQ ID NO: 28731 - DNA, 16 bp, Artificial
  oligonucleotide probe
gtccggaagtgggcga

SEQ ID NO: 28732 - DNA, 16 bp, Artificial
  oligonucleotide probe
accacggaagcgcgga

SEQ ID NO: 28733 - DNA, 16 bp, Artificial
  oligonucleotide probe
accacggaagcgcgga

SEQ ID NO: 28734 - DNA, 16 bp, Artificial
  oligonucleotide probe
agcggtccgcgagagc

SEQ ID NO: 28735 - DNA, 16 bp, Artificial
  oligonucleotide probe
agcggtccgcgagagc

SEQ ID NO: 28736 - DNA, 16 bp, Artificial
  oligonucleotide probe
acgcaccagtcccgga

SEQ ID NO: 28737 - DNA, 16 bp, Artificial
  oligonucleotide probe
acgcaccagtcccgga

SEQ ID NO: 28738 - DNA, 16 bp, Artificial
  oligonucleotide probe
gcagcggagcctgagc

SEQ ID NO: 28739 - DNA, 16 bp, Artificial
  oligonucleotide probe
gcagcggagcctgagc

SEQ ID NO: 28740 - DNA, 16 bp, Artificial
  oligonucleotide probe
gcgagtggcagggcct

SEQ ID NO: 28741 - DNA, 16 bp, Artificial
  oligonucleotide probe
gcgagtggcagggcct

SEQ ID NO: 28742 - DNA, 16 bp, Artificial
  oligonucleotide probe
ggaaagcggcctggaa

SEQ ID NO: 28743 - DNA, 16 bp, Artificial
  oligonucleotide probe
ggaaagcggcctggaa

SEQ ID NO: 28744 - DNA, 16 bp, Artificial
  oligonucleotide probe
gcgacgagcgagccaa

SEQ ID NO: 28745 - DNA, 16 bp, Artificial
  oligonucleotide probe
gcgacgagcgagccaa

SEQ ID NO: 28746 - DNA, 16 bp, Artificial
  oligonucleotide probe
cctccgaggacgcgga

SEQ ID NO: 28747 - DNA, 16 bp, Artificial
  oligonucleotide probe
cctccgaggacgcgga

SEQ ID NO: 28748 - DNA, 16 bp, Artificial
  oligonucleotide probe
agcgccaatcacgggt

SEQ ID NO: 28749 - DNA, 16 bp, Artificial
  oligonucleotide probe
agcgccaatcacgggt

SEQ ID NO: 28750 - DNA, 16 bp, Artificial
  oligonucleotide probe
acgccaggcgaggtgg

SEQ ID NO: 28751 - DNA, 16 bp, Artificial
  oligonucleotide probe
acgccaggcgaggtgg

SEQ ID NO: 28752 - DNA, 16 bp, Artificial
  oligonucleotide probe
gggtggaacgaggcga

SEQ ID NO: 28753 - DNA, 16 bp, Artificial
  oligonucleotide probe
gggtggaacgaggcga

SEQ ID NO: 28754 - DNA, 16 bp, Artificial
  oligonucleotide probe
gcgatggccaggtggc

SEQ ID NO: 28755 - DNA, 16 bp, Artificial
  oligonucleotide probe
gcgatggccaggtggc

SEQ ID NO: 28756 - DNA, 16 bp, Artificial
  oligonucleotide probe
ccaaagcgggaatggc

SEQ ID NO: 28757 - DNA, 16 bp, Artificial
  oligonucleotide probe
ccaaagcgggaatggc

SEQ ID NO: 28758 - DNA, 16 bp, Artificial
  oligonucleotide probe
accatggcacgcgacg

SEQ ID NO: 28759 - DNA, 16 bp, Artificial
  oligonucleotide probe
accatggcacgcgacg

SEQ ID NO: 28760 - DNA, 16 bp, Artificial
  oligonucleotide probe
tggcgtgggggtccaa

SEQ ID NO: 28761 - DNA, 16 bp, Artificial
  oligonucleotide probe
tggcgtgggggtccaa

SEQ ID NO: 28762 - DNA, 16 bp, Artificial
  oligonucleotide probe
agcgagcggtggacgc

SEQ ID NO: 28763 - DNA, 16 bp, Artificial
  oligonucleotide probe
agcgagcggtggacgc

SEQ ID NO: 28764 - DNA, 16 bp, Artificial
  oligonucleotide probe
ggtcgacgacgccgag

SEQ ID NO: 28765 - DNA, 16 bp, Artificial
  oligonucleotide probe
ggtcgacgacgccgag

SEQ ID NO: 28766 - DNA, 16 bp, Artificial
  oligonucleotide probe
caccgagccacccgga

SEQ ID NO: 28767 - DNA, 16 bp, Artificial
  oligonucleotide probe
caccgagccacccgga

SEQ ID NO: 28768 - DNA, 16 bp, Artificial
  oligonucleotide probe
caccgggtggtcagcg

SEQ ID NO: 28769 - DNA, 16 bp, Artificial
  oligonucleotide probe
caccgggtggtcagcg

SEQ ID NO: 28770 - DNA, 16 bp, Artificial
  oligonucleotide probe
acgcgggtcaccgtcc

SEQ ID NO: 28771 - DNA, 16 bp, Artificial
  oligonucleotide probe
acgcgggtcaccgtcc

SEQ ID NO: 28772 - DNA, 16 bp, Artificial
  oligonucleotide probe
acgccaggcgaggtgg

SEQ ID NO: 28773 - DNA, 16 bp, Artificial
  oligonucleotide probe
acgccaggcgaggtgg

SEQ ID NO: 28774 - DNA, 16 bp, Artificial
  oligonucleotide probe
gcctagcgcctcgacg

SEQ ID NO: 28775 - DNA, 16 bp, Artificial
  oligonucleotide probe
gcctagcgcctcgacg

SEQ ID NO: 28776 - DNA, 16 bp, Artificial
  oligonucleotide probe
gcagcggagcctgagc

SEQ ID NO: 28777 - DNA, 16 bp, Artificial
  oligonucleotide probe
gcagcggagcctgagc

SEQ ID NO: 28778 - DNA, 16 bp, Artificial
  oligonucleotide probe
gggtggaacgaggcga

SEQ ID NO: 28779 - DNA, 16 bp, Artificial
  oligonucleotide probe
gggtggaacgaggcga

SEQ ID NO: 28780 - DNA, 16 bp, Artificial
  oligonucleotide probe
ggaagcctgcgacgga

SEQ ID NO: 28781 - DNA, 16 bp, Artificial
  oligonucleotide probe
ggaagcctgcgacgga

SEQ ID NO: 28782 - DNA, 16 bp, Artificial
  oligonucleotide probe
ggtcgacgacgccgag

SEQ ID NO: 28783 - DNA, 16 bp, Artificial
  oligonucleotide probe
ggtcgacgacgccgag

SEQ ID NO: 28784 - DNA, 16 bp, Artificial
  oligonucleotide probe
gcaggtggtggcgagc

SEQ ID NO: 28785 - DNA, 16 bp, Artificial
  oligonucleotide probe
gcaggtggtggcgagc

SEQ ID NO: 28786 - DNA, 16 bp, Artificial
  oligonucleotide probe
acgcgcctgacgcctc

SEQ ID NO: 28787 - DNA, 16 bp, Artificial
  oligonucleotide probe
acgcgcctgacgcctc

SEQ ID NO: 28788 - DNA, 16 bp, Artificial
  oligonucleotide probe
gcagcctctggccgag

SEQ ID NO: 28789 - DNA, 16 bp, Artificial
  oligonucleotide probe
gcagcctctggccgag

SEQ ID NO: 28790 - DNA, 16 bp, Artificial
  oligonucleotide probe
gagcgcgacacccagg

SEQ ID NO: 28791 - DNA, 16 bp, Artificial
  oligonucleotide probe
gagcgcgacacccagg

SEQ ID NO: 28792 - DNA, 16 bp, Artificial
  oligonucleotide probe
ggaagcctgcgacgga

SEQ ID NO: 28793 - DNA, 16 bp, Artificial
  oligonucleotide probe
ggaagcctgcgacgga

SEQ ID NO: 28794 - DNA, 16 bp, Artificial
  oligonucleotide probe
gcctgcgagagctggc

SEQ ID NO: 28795 - DNA, 16 bp, Artificial
  oligonucleotide probe
gcctgcgagagctggc

SEQ ID NO: 28796 - DNA, 16 bp, Artificial
  oligonucleotide probe
caccgcgaggtcacgc

SEQ ID NO: 28797 - DNA, 16 bp, Artificial
  oligonucleotide probe
caccgcgaggtcacgc

SEQ ID NO: 28798 - DNA, 16 bp, Artificial
  oligonucleotide probe
acgcggaagacgtggc

SEQ ID NO: 28799 - DNA, 16 bp, Artificial
  oligonucleotide probe
acgcggaagacgtggc

SEQ ID NO: 28800 - DNA, 16 bp, Artificial
  oligonucleotide probe
gcagcggagcctgagc

SEQ ID NO: 28801 - DNA, 16 bp, Artificial
  oligonucleotide probe
gcagcggagcctgagc

SEQ ID NO: 28802 - DNA, 16 bp, Artificial
  oligonucleotide probe
tggcgtgggggtccaa

SEQ ID NO: 28803 - DNA, 16 bp, Artificial
  oligonucleotide probe
tggcgtgggggtccaa

SEQ ID NO: 28804 - DNA, 16 bp, Artificial
  oligonucleotide probe
gggttggccgagtggc

SEQ ID NO: 28805 - DNA, 16 bp, Artificial
  oligonucleotide probe
gggttggccgagtggc

SEQ ID NO: 28806 - DNA, 16 bp, Artificial
  oligonucleotide probe
accatggcacgcgacg

SEQ ID NO: 28807 - DNA, 16 bp, Artificial
  oligonucleotide probe
accatggcacgcgacg

SEQ ID NO: 28808 - DNA, 16 bp, Artificial
  oligonucleotide probe
acgcgcctgacgcctc

SEQ ID NO: 28809 - DNA, 16 bp, Artificial
  oligonucleotide probe
acgcgcctgacgcctc

SEQ ID NO: 28810 - DNA, 16 bp, Artificial
  oligonucleotide probe
accatggcacgcgacg

SEQ ID NO: 28811 - DNA, 16 bp, Artificial
  oligonucleotide probe
accatggcacgcgacg

SEQ ID NO: 28812 - DNA, 16 bp, Artificial
  oligonucleotide probe
tgctgggtgcaggcga

SEQ ID NO: 28813 - DNA, 16 bp, Artificial
  oligonucleotide probe
tgctgggtgcaggcga

SEQ ID NO: 28814 - DNA, 16 bp, Artificial
  oligonucleotide probe
tggcgtgggggtccaa

SEQ ID NO: 28815 - DNA, 16 bp, Artificial
  oligonucleotide probe
tggcgtgggggtccaa

SEQ ID NO: 28816 - DNA, 16 bp, Artificial
  oligonucleotide probe
accatggcacgcgacg

SEQ ID NO: 28817 - DNA, 16 bp, Artificial
  oligonucleotide probe
accatggcacgcgacg

SEQ ID NO: 28818 - DNA, 16 bp, Artificial
  oligonucleotide probe
gcagcggagcctgagc

SEQ ID NO: 28819 - DNA, 16 bp, Artificial
  oligonucleotide probe
gcagcggagcctgagc

SEQ ID NO: 28820 - DNA, 16 bp, Artificial
  oligonucleotide probe
cctctggctggcccaa

SEQ ID NO: 28821 - DNA, 16 bp, Artificial
  oligonucleotide probe
cctctggctggcccaa

SEQ ID NO: 28822 - DNA, 16 bp, Artificial
  oligonucleotide probe
tggcgtgggggtccaa

SEQ ID NO: 28823 - DNA, 16 bp, Artificial
  oligonucleotide probe
tggcgtgggggtccaa

SEQ ID NO: 28824 - DNA, 16 bp, Artificial
  oligonucleotide probe
tggcggtcgcctcgag

SEQ ID NO: 28825 - DNA, 16 bp, Artificial
  oligonucleotide probe
tggcggtcgcctcgag

SEQ ID NO: 28826 - DNA, 16 bp, Artificial
  oligonucleotide probe
gggtggaacgaggcga

SEQ ID NO: 28827 - DNA, 16 bp, Artificial
  oligonucleotide probe
gggtggaacgaggcga

SEQ ID NO: 28828 - DNA, 16 bp, Artificial
  oligonucleotide probe
agcgccaatcacgggt

SEQ ID NO: 28829 - DNA, 16 bp, Artificial
  oligonucleotide probe
agcgccaatcacgggt

SEQ ID NO: 28830 - DNA, 16 bp, Artificial
  oligonucleotide probe
caccgagccacccgga

SEQ ID NO: 28831 - DNA, 16 bp, Artificial
  oligonucleotide probe
caccgagccacccgga

SEQ ID NO: 28832 - DNA, 16 bp, Artificial
  oligonucleotide probe
gcagcggagcctgagc

SEQ ID NO: 28833 - DNA, 16 bp, Artificial
  oligonucleotide probe
gcagcggagcctgagc

SEQ ID NO: 28834 - DNA, 16 bp, Artificial
  oligonucleotide probe
caggagcgggaagcga

SEQ ID NO: 28835 - DNA, 16 bp, Artificial
  oligonucleotide probe
caggagcgggaagcga

SEQ ID NO: 28836 - DNA, 16 bp, Artificial
  oligonucleotide probe
gcctagcgcctcgacg

SEQ ID NO: 28837 - DNA, 16 bp, Artificial
  oligonucleotide probe
gcctagcgcctcgacg

SEQ ID NO: 28838 - DNA, 16 bp, Artificial
  oligonucleotide probe
tggcgtgggggtccaa

SEQ ID NO: 28839 - DNA, 16 bp, Artificial
  oligonucleotide probe
tggcgtgggggtccaa

SEQ ID NO: 28840 - DNA, 16 bp, Artificial
  oligonucleotide probe
gtggcggaggtcggaa

SEQ ID NO: 28841 - DNA, 16 bp, Artificial
  oligonucleotide probe
gtggcggaggtcggaa

SEQ ID NO: 28842 - DNA, 16 bp, Artificial
  oligonucleotide probe
gacggacgacgcgtgg

SEQ ID NO: 28843 - DNA, 16 bp, Artificial
  oligonucleotide probe
gacggacgacgcgtgg

SEQ ID NO: 28844 - DNA, 16 bp, Artificial
  oligonucleotide probe
tgctgggtgcaggcga

SEQ ID NO: 28845 - DNA, 16 bp, Artificial
  oligonucleotide probe
tgctgggtgcaggcga

SEQ ID NO: 28846 - DNA, 16 bp, Artificial
  oligonucleotide probe
gcctgggtcaccacgc

SEQ ID NO: 28847 - DNA, 16 bp, Artificial
  oligonucleotide probe
gcctgggtcaccacgc

SEQ ID NO: 28848 - DNA, 16 bp, Artificial
  oligonucleotide probe
gagcgcgacacccagg

SEQ ID NO: 28849 - DNA, 16 bp, Artificial
  oligonucleotide probe
gagcgcgacacccagg

SEQ ID NO: 28850 - DNA, 16 bp, Artificial
  oligonucleotide probe
gcctagcgcctcgacg

SEQ ID NO: 28851 - DNA, 16 bp, Artificial
  oligonucleotide probe
gcctagcgcctcgacg

SEQ ID NO: 28852 - DNA, 16 bp, Artificial
  oligonucleotide probe
agcgccaatcacgggt

SEQ ID NO: 28853 - DNA, 16 bp, Artificial
  oligonucleotide probe
agcgccaatcacgggt

SEQ ID NO: 28854 - DNA, 16 bp, Artificial
  oligonucleotide probe
caggagcgggaagcga

SEQ ID NO: 28855 - DNA, 16 bp, Artificial
  oligonucleotide probe
caggagcgggaagcga

SEQ ID NO: 28856 - DNA, 16 bp, Artificial
  oligonucleotide probe
gacggcgagtgggcag

SEQ ID NO: 28857 - DNA, 16 bp, Artificial
  oligonucleotide probe
gacggcgagtgggcag

SEQ ID NO: 28858 - DNA, 16 bp, Artificial
  oligonucleotide probe
gcagcctctggccgag

SEQ ID NO: 28859 - DNA, 16 bp, Artificial
  oligonucleotide probe
gcagcctctggccgag

SEQ ID NO: 28860 - DNA, 16 bp, Artificial
  oligonucleotide probe
caccgacgggaaacgc

SEQ ID NO: 28861 - DNA, 16 bp, Artificial
  oligonucleotide probe
caccgacgggaaacgc

SEQ ID NO: 28862 - DNA, 16 bp, Artificial
  oligonucleotide probe
accatggcacgcgacg

SEQ ID NO: 28863 - DNA, 16 bp, Artificial
  oligonucleotide probe
accatggcacgcgacg

SEQ ID NO: 28864 - DNA, 16 bp, Artificial
  oligonucleotide probe
gtccacgctggcgacg

SEQ ID NO: 28865 - DNA, 16 bp, Artificial
  oligonucleotide probe
gtccacgctggcgacg

SEQ ID NO: 28866 - DNA, 16 bp, Artificial
  oligonucleotide probe
agcgagcggtggacgc

SEQ ID NO: 28867 - DNA, 16 bp, Artificial
  oligonucleotide probe
agcgagcggtggacgc

SEQ ID NO: 28868 - DNA, 16 bp, Artificial
  oligonucleotide probe
accatggcacgcgacg

SEQ ID NO: 28869 - DNA, 16 bp, Artificial
  oligonucleotide probe
accatggcacgcgacg

SEQ ID NO: 28870 - DNA, 16 bp, Artificial
  oligonucleotide probe
gcagcctctggccgag

SEQ ID NO: 28871 - DNA, 16 bp, Artificial
  oligonucleotide probe
gcagcctctggccgag

SEQ ID NO: 28872 - DNA, 16 bp, Artificial
  oligonucleotide probe
gggtggaacgaggcga

SEQ ID NO: 28873 - DNA, 16 bp, Artificial
  oligonucleotide probe
gggtggaacgaggcga

SEQ ID NO: 28874 - DNA, 16 bp, Artificial
  oligonucleotide probe
cctccgaggacgcgga

SEQ ID NO: 28875 - DNA, 16 bp, Artificial
  oligonucleotide probe
cctccgaggacgcgga

SEQ ID NO: 28876 - DNA, 16 bp, Artificial
  oligonucleotide probe
gcaggcagccaatggc

SEQ ID NO: 28877 - DNA, 16 bp, Artificial
  oligonucleotide probe
gcaggcagccaatggc

SEQ ID NO: 28878 - DNA, 16 bp, Artificial
  oligonucleotide probe
tcacgccttggccacc

SEQ ID NO: 28879 - DNA, 16 bp, Artificial
  oligonucleotide probe
tcacgccttggccacc

SEQ ID NO: 28880 - DNA, 16 bp, Artificial
  oligonucleotide probe
gagcgcgacacccagg

SEQ ID NO: 28881 - DNA, 16 bp, Artificial
  oligonucleotide probe
gagcgcgacacccagg

SEQ ID NO: 28882 - DNA, 16 bp, Artificial
  oligonucleotide probe
cggacaggacgctggc

SEQ ID NO: 28883 - DNA, 16 bp, Artificial
  oligonucleotide probe
cggacaggacgctggc

SEQ ID NO: 28884 - DNA, 16 bp, Artificial
  oligonucleotide probe
gacggcgagtgggcag

SEQ ID NO: 28885 - DNA, 16 bp, Artificial
  oligonucleotide probe
gacggcgagtgggcag

SEQ ID NO: 28886 - DNA, 16 bp, Artificial
  oligonucleotide probe
cggacaggacgctggc

SEQ ID NO: 28887 - DNA, 16 bp, Artificial
  oligonucleotide probe
cggacaggacgctggc

SEQ ID NO: 28888 - DNA, 16 bp, Artificial
  oligonucleotide probe
gcgagtggcagggcct

SEQ ID NO: 28889 - DNA, 16 bp, Artificial
  oligonucleotide probe
gcgagtggcagggcct

SEQ ID NO: 28890 - DNA, 16 bp, Artificial
  oligonucleotide probe
acgcgcctgacgcctc

SEQ ID NO: 28891 - DNA, 16 bp, Artificial
  oligonucleotide probe
acgcgcctgacgcctc

SEQ ID NO: 28892 - DNA, 16 bp, Artificial
  oligonucleotide probe
caccgcgaggtcacgc

SEQ ID NO: 28893 - DNA, 16 bp, Artificial
  oligonucleotide probe
caccgcgaggtcacgc

SEQ ID NO: 28894 - DNA, 16 bp, Artificial
  oligonucleotide probe
acgcgcctgacgcctc

SEQ ID NO: 28895 - DNA, 16 bp, Artificial
  oligonucleotide probe
acgcgcctgacgcctc

SEQ ID NO: 28896 - DNA, 16 bp, Artificial
  oligonucleotide probe
cctctggctggcccaa

SEQ ID NO: 28897 - DNA, 16 bp, Artificial
  oligonucleotide probe
cctctggctggcccaa

SEQ ID NO: 28898 - DNA, 16 bp, Artificial
  oligonucleotide probe
cctccgaggacgcgga

SEQ ID NO: 28899 - DNA, 16 bp, Artificial
  oligonucleotide probe
cctccgaggacgcgga

SEQ ID NO: 28900 - DNA, 16 bp, Artificial
  oligonucleotide probe
caggagcgggaagcga

SEQ ID NO: 28901 - DNA, 16 bp, Artificial
  oligonucleotide probe
caggagcgggaagcga

SEQ ID NO: 28902 - DNA, 16 bp, Artificial
  oligonucleotide probe
gcaggcagccaatggc

SEQ ID NO: 28903 - DNA, 16 bp, Artificial
  oligonucleotide probe
gcaggcagccaatggc

SEQ ID NO: 28904 - DNA, 16 bp, Artificial
  oligonucleotide probe
gacggcgagtgggcag

SEQ ID NO: 28905 - DNA, 16 bp, Artificial
  oligonucleotide probe
gacggcgagtgggcag

SEQ ID NO: 28906 - DNA, 16 bp, Artificial
  oligonucleotide probe
gagcgcgacacccagg

SEQ ID NO: 28907 - DNA, 16 bp, Artificial
  oligonucleotide probe
gagcgcgacacccagg

SEQ ID NO: 28908 - DNA, 16 bp, Artificial
  oligonucleotide probe
cctcagcgcggaacca

SEQ ID NO: 28909 - DNA, 16 bp, Artificial
  oligonucleotide probe
cctcagcgcggaacca

SEQ ID NO: 28910 - DNA, 16 bp, Artificial
  oligonucleotide probe
gcaggtggtggcgagc

SEQ ID NO: 28911 - DNA, 16 bp, Artificial
  oligonucleotide probe
gcaggtggtggcgagc

SEQ ID NO: 28912 - DNA, 16 bp, Artificial
  oligonucleotide probe
gacggacgacgcgtgg

SEQ ID NO: 28913 - DNA, 16 bp, Artificial
  oligonucleotide probe
gacggacgacgcgtgg

SEQ ID NO: 28914 - DNA, 16 bp, Artificial
  oligonucleotide probe
cctctggctggcccaa

SEQ ID NO: 28915 - DNA, 16 bp, Artificial
  oligonucleotide probe
cctctggctggcccaa

SEQ ID NO: 28916 - DNA, 16 bp, Artificial
  oligonucleotide probe
gtccggaagtgggcga

SEQ ID NO: 28917 - DNA, 16 bp, Artificial
  oligonucleotide probe
gtccggaagtgggcga

SEQ ID NO: 28918 - DNA, 16 bp, Artificial
  oligonucleotide probe
agcggtccgcgagagc

SEQ ID NO: 28919 - DNA, 16 bp, Artificial
  oligonucleotide probe
agcggtccgcgagagc

SEQ ID NO: 28920 - DNA, 16 bp, Artificial
  oligonucleotide probe
caggcacccaggcgga

SEQ ID NO: 28921 - DNA, 16 bp, Artificial
  oligonucleotide probe
caggcacccaggcgga

SEQ ID NO: 28922 - DNA, 16 bp, Artificial
  oligonucleotide probe
tgctgggtgcaggcga

SEQ ID NO: 28923 - DNA, 16 bp, Artificial
  oligonucleotide probe
tgctgggtgcaggcga

SEQ ID NO: 28924 - DNA, 16 bp, Artificial
  oligonucleotide probe
caggggaagggtcgga

SEQ ID NO: 28925 - DNA, 16 bp, Artificial
  oligonucleotide probe
caggggaagggtcgga

SEQ ID NO: 28926 - DNA, 16 bp, Artificial
  oligonucleotide probe
gcagcggagcctgagc

SEQ ID NO: 28927 - DNA, 16 bp, Artificial
  oligonucleotide probe
gcagcggagcctgagc

SEQ ID NO: 28928 - DNA, 16 bp, Artificial
  oligonucleotide probe
acgcaccagtcccgga

SEQ ID NO: 28929 - DNA, 16 bp, Artificial
  oligonucleotide probe
acgcaccagtcccgga

SEQ ID NO: 28930 - DNA, 16 bp, Artificial
  oligonucleotide probe
acgcggtccaccgtgg

SEQ ID NO: 28931 - DNA, 16 bp, Artificial
  oligonucleotide probe
acgcggtccaccgtgg

SEQ ID NO: 28932 - DNA, 16 bp, Artificial
  oligonucleotide probe
ggtcgacgacgccgag

SEQ ID NO: 28933 - DNA, 16 bp, Artificial
  oligonucleotide probe
ggtcgacgacgccgag

SEQ ID NO: 28934 - DNA, 16 bp, Artificial
  oligonucleotide probe
gtccacgctggcgacg

SEQ ID NO: 28935 - DNA, 16 bp, Artificial
  oligonucleotide probe
gtccacgctggcgacg

SEQ ID NO: 28936 - DNA, 16 bp, Artificial
  oligonucleotide probe
gcctcggagacggcag

SEQ ID NO: 28937 - DNA, 16 bp, Artificial
  oligonucleotide probe
gcctcggagacggcag

SEQ ID NO: 28938 - DNA, 16 bp, Artificial
  oligonucleotide probe
ggaagcctgcgacgga

SEQ ID NO: 28939 - DNA, 16 bp, Artificial
  oligonucleotide probe
ggaagcctgcgacgga

SEQ ID NO: 28940 - DNA, 16 bp, Artificial
  oligonucleotide probe
gacggacgacgcgtgg

SEQ ID NO: 28941 - DNA, 16 bp, Artificial
  oligonucleotide probe
gacggacgacgcgtgg

SEQ ID NO: 28942 - DNA, 16 bp, Artificial
  oligonucleotide probe
agcgccaatcacgggt

SEQ ID NO: 28943 - DNA, 16 bp, Artificial
  oligonucleotide probe
agcgccaatcacgggt

SEQ ID NO: 28944 - DNA, 16 bp, Artificial
  oligonucleotide probe
gcagcggagcctgagc

SEQ ID NO: 28945 - DNA, 16 bp, Artificial
  oligonucleotide probe
gcagcggagcctgagc

SEQ ID NO: 28946 - DNA, 16 bp, Artificial
  oligonucleotide probe
tggcagcgggtcgtgg

SEQ ID NO: 28947 - DNA, 16 bp, Artificial
  oligonucleotide probe
tggcagcgggtcgtgg

SEQ ID NO: 28948 - DNA, 16 bp, Artificial
  oligonucleotide probe
gcagcaccagcgtggc

SEQ ID NO: 28949 - DNA, 16 bp, Artificial
  oligonucleotide probe
gcagcaccagcgtggc

SEQ ID NO: 28950 - DNA, 16 bp, Artificial
  oligonucleotide probe
gacgcaggcggagggt

SEQ ID NO: 28951 - DNA, 16 bp, Artificial
  oligonucleotide probe
gacgcaggcggagggt

SEQ ID NO: 28952 - DNA, 16 bp, Artificial
  oligonucleotide probe
gtggcggaggtcggaa

SEQ ID NO: 28953 - DNA, 16 bp, Artificial
  oligonucleotide probe
gtggcggaggtcggaa

SEQ ID NO: 28954 - DNA, 16 bp, Artificial
  oligonucleotide probe
caccgggtggtcagcg

SEQ ID NO: 28955 - DNA, 16 bp, Artificial
  oligonucleotide probe
caccgggtggtcagcg

SEQ ID NO: 28956 - DNA, 16 bp, Artificial
  oligonucleotide probe
gtggcggaggtcggaa

SEQ ID NO: 28957 - DNA, 16 bp, Artificial
  oligonucleotide probe
gtggcggaggtcggaa

SEQ ID NO: 28958 - DNA, 16 bp, Artificial
  oligonucleotide probe
tggcggtcgcctcgag

SEQ ID NO: 28959 - DNA, 16 bp, Artificial
  oligonucleotide probe
tggcggtcgcctcgag

SEQ ID NO: 28960 - DNA, 16 bp, Artificial
  oligonucleotide probe
tgctgggtgcaggcga

SEQ ID NO: 28961 - DNA, 16 bp, Artificial
  oligonucleotide probe
tgctgggtgcaggcga

SEQ ID NO: 28962 - DNA, 16 bp, Artificial
  oligonucleotide probe
gcctcggagacggcag

SEQ ID NO: 28963 - DNA, 16 bp, Artificial
  oligonucleotide probe
gcctcggagacggcag

SEQ ID NO: 28964 - DNA, 16 bp, Artificial
  oligonucleotide probe
gtccgggtcaggcagg

SEQ ID NO: 28965 - DNA, 16 bp, Artificial
  oligonucleotide probe
gtccgggtcaggcagg

SEQ ID NO: 28966 - DNA, 16 bp, Artificial
  oligonucleotide probe
gagcgcgacacccagg

SEQ ID NO: 28967 - DNA, 16 bp, Artificial
  oligonucleotide probe
gagcgcgacacccagg

SEQ ID NO: 28968 - DNA, 16 bp, Artificial
  oligonucleotide probe
gcctgtgggtccgcga

SEQ ID NO: 28969 - DNA, 16 bp, Artificial
  oligonucleotide probe
gcctgtgggtccgcga

SEQ ID NO: 28970 - DNA, 16 bp, Artificial
  oligonucleotide probe
gagcggtctggcggaa

SEQ ID NO: 28971 - DNA, 16 bp, Artificial
  oligonucleotide probe
gagcggtctggcggaa

SEQ ID NO: 28972 - DNA, 16 bp, Artificial
  oligonucleotide probe
ggtcgacgacgccgag

SEQ ID NO: 28973 - DNA, 16 bp, Artificial
  oligonucleotide probe
ggtcgacgacgccgag

SEQ ID NO: 28974 - DNA, 16 bp, Artificial
  oligonucleotide probe
gtccacgctggcgacg

SEQ ID NO: 28975 - DNA, 16 bp, Artificial
  oligonucleotide probe
gtccacgctggcgacg

SEQ ID NO: 28976 - DNA, 16 bp, Artificial
  oligonucleotide probe
caggggaagggtcgga

SEQ ID NO: 28977 - DNA, 16 bp, Artificial
  oligonucleotide probe
caggggaagggtcgga

SEQ ID NO: 28978 - DNA, 16 bp, Artificial
  oligonucleotide probe
cggacaggacgctggc

SEQ ID NO: 28979 - DNA, 16 bp, Artificial
  oligonucleotide probe
cggacaggacgctggc

SEQ ID NO: 28980 - DNA, 16 bp, Artificial
  oligonucleotide probe
caccgggtggtcagcg

SEQ ID NO: 28981 - DNA, 16 bp, Artificial
  oligonucleotide probe
caccgggtggtcagcg

SEQ ID NO: 28982 - DNA, 16 bp, Artificial
  oligonucleotide probe
gtccggaagtgggcga

SEQ ID NO: 28983 - DNA, 16 bp, Artificial
  oligonucleotide probe
gtccggaagtgggcga

SEQ ID NO: 28984 - DNA, 16 bp, Artificial
  oligonucleotide probe
gacggcgagtgggcag

SEQ ID NO: 28985 - DNA, 16 bp, Artificial
  oligonucleotide probe
gacggcgagtgggcag

SEQ ID NO: 28986 - DNA, 16 bp, Artificial
  oligonucleotide probe
gggtggaacgaggcga

SEQ ID NO: 28987 - DNA, 16 bp, Artificial
  oligonucleotide probe
gggtggaacgaggcga

SEQ ID NO: 28988 - DNA, 16 bp, Artificial
  oligonucleotide probe
ggtcgacgacgccgag

SEQ ID NO: 28989 - DNA, 16 bp, Artificial
  oligonucleotide probe
ggtcgacgacgccgag

SEQ ID NO: 28990 - DNA, 16 bp, Artificial
  oligonucleotide probe
caccgcgaggtcacgc

SEQ ID NO: 28991 - DNA, 16 bp, Artificial
  oligonucleotide probe
caccgcgaggtcacgc

SEQ ID NO: 28992 - DNA, 16 bp, Artificial
  oligonucleotide probe
ggtccggagcagacgc

SEQ ID NO: 28993 - DNA, 16 bp, Artificial
  oligonucleotide probe
ggtccggagcagacgc

SEQ ID NO: 28994 - DNA, 16 bp, Artificial
  oligonucleotide probe
acgcaccagtcccgga

SEQ ID NO: 28995 - DNA, 16 bp, Artificial
  oligonucleotide probe
acgcaccagtcccgga

SEQ ID NO: 28996 - DNA, 16 bp, Artificial
  oligonucleotide probe
gcctcggagacggcag

SEQ ID NO: 28997 - DNA, 16 bp, Artificial
  oligonucleotide probe
gcctcggagacggcag

SEQ ID NO: 28998 - DNA, 16 bp, Artificial
  oligonucleotide probe
tcacgccttggccacc

SEQ ID NO: 28999 - DNA, 16 bp, Artificial
  oligonucleotide probe
tcacgccttggccacc

SEQ ID NO: 29000 - DNA, 16 bp, Artificial
  oligonucleotide probe
gcctagcgcctcgacg

SEQ ID NO: 29001 - DNA, 16 bp, Artificial
  oligonucleotide probe
gcctagcgcctcgacg

SEQ ID NO: 29002 - DNA, 16 bp, Artificial
  oligonucleotide probe
gcgaagcggcgaggtc

SEQ ID NO: 29003 - DNA, 16 bp, Artificial
  oligonucleotide probe
gcgaagcggcgaggtc

SEQ ID NO: 29004 - DNA, 16 bp, Artificial
  oligonucleotide probe
gcgacgagcgagccaa

SEQ ID NO: 29005 - DNA, 16 bp, Artificial
  oligonucleotide probe
gcgacgagcgagccaa

SEQ ID NO: 29006 - DNA, 16 bp, Artificial
  oligonucleotide probe
gacgcaggcggagggt

SEQ ID NO: 29007 - DNA, 16 bp, Artificial
  oligonucleotide probe
gacgcaggcggagggt

SEQ ID NO: 29008 - DNA, 16 bp, Artificial
  oligonucleotide probe
cctcagcgcggaacca

SEQ ID NO: 29009 - DNA, 16 bp, Artificial
  oligonucleotide probe
cctcagcgcggaacca

SEQ ID NO: 29010 - DNA, 16 bp, Artificial
  oligonucleotide probe
tggcgtgggggtccaa

SEQ ID NO: 29011 - DNA, 16 bp, Artificial
  oligonucleotide probe
tggcgtgggggtccaa

SEQ ID NO: 29012 - DNA, 16 bp, Artificial
  oligonucleotide probe
acgcggtccaccgtgg

SEQ ID NO: 29013 - DNA, 16 bp, Artificial
  oligonucleotide probe
acgcggtccaccgtgg

SEQ ID NO: 29014 - DNA, 16 bp, Artificial
  oligonucleotide probe
gtggcggaggtcggaa

SEQ ID NO: 29015 - DNA, 16 bp, Artificial
  oligonucleotide probe
gtggcggaggtcggaa

SEQ ID NO: 29016 - DNA, 16 bp, Artificial
  oligonucleotide probe
acgcggtccaccgtgg

SEQ ID NO: 29017 - DNA, 16 bp, Artificial
  oligonucleotide probe
acgcggtccaccgtgg

SEQ ID NO: 29018 - DNA, 16 bp, Artificial
  oligonucleotide probe
ggaaagcggcctggaa

SEQ ID NO: 29019 - DNA, 16 bp, Artificial
  oligonucleotide probe
ggaaagcggcctggaa

SEQ ID NO: 29020 - DNA, 16 bp, Artificial
  oligonucleotide probe
gcctagcgcctcgacg

SEQ ID NO: 29021 - DNA, 16 bp, Artificial
  oligonucleotide probe
gcctagcgcctcgacg

SEQ ID NO: 29022 - DNA, 16 bp, Artificial
  oligonucleotide probe
gcctgggtcaccacgc

SEQ ID NO: 29023 - DNA, 16 bp, Artificial
  oligonucleotide probe
gcctgggtcaccacgc

SEQ ID NO: 29024 - DNA, 16 bp, Artificial
  oligonucleotide probe
gacggacgacgcgtgg

SEQ ID NO: 29025 - DNA, 16 bp, Artificial
  oligonucleotide probe
gacggacgacgcgtgg

SEQ ID NO: 29026 - DNA, 16 bp, Artificial
  oligonucleotide probe
ggaagcctgcgacgga

SEQ ID NO: 29027 - DNA, 16 bp, Artificial
  oligonucleotide probe
ggaagcctgcgacgga

SEQ ID NO: 29028 - DNA, 16 bp, Artificial
  oligonucleotide probe
gacggcgagtgggcag

SEQ ID NO: 29029 - DNA, 16 bp, Artificial
  oligonucleotide probe
gacggcgagtgggcag

SEQ ID NO: 29030 - DNA, 16 bp, Artificial
  oligonucleotide probe
gtccacgctggcgacg

SEQ ID NO: 29031 - DNA, 16 bp, Artificial
  oligonucleotide probe
gtccacgctggcgacg

SEQ ID NO: 29032 - DNA, 16 bp, Artificial
  oligonucleotide probe
acgcggaagacgtggc

SEQ ID NO: 29033 - DNA, 16 bp, Artificial
  oligonucleotide probe
acgcggaagacgtggc

SEQ ID NO: 29034 - DNA, 16 bp, Artificial
  oligonucleotide probe
caccgggtggtcagcg

SEQ ID NO: 29035 - DNA, 16 bp, Artificial
  oligonucleotide probe
caccgggtggtcagcg

SEQ ID NO: 29036 - DNA, 16 bp, Artificial
  oligonucleotide probe
cggacaggacgctggc

SEQ ID NO: 29037 - DNA, 16 bp, Artificial
  oligonucleotide probe
cggacaggacgctggc

SEQ ID NO: 29038 - DNA, 16 bp, Artificial
  oligonucleotide probe
cctcagcgcggaacca

SEQ ID NO: 29039 - DNA, 16 bp, Artificial
  oligonucleotide probe
cctcagcgcggaacca

SEQ ID NO: 29040 - DNA, 16 bp, Artificial
  oligonucleotide probe
gacggggtcggacgag

SEQ ID NO: 29041 - DNA, 16 bp, Artificial
  oligonucleotide probe
gacggggtcggacgag

SEQ ID NO: 29042 - DNA, 16 bp, Artificial
  oligonucleotide probe
gacggcgagtgggcag

SEQ ID NO: 29043 - DNA, 16 bp, Artificial
  oligonucleotide probe
gacggcgagtgggcag

SEQ ID NO: 29044 - DNA, 16 bp, Artificial
  oligonucleotide probe
gcgacgagcgagccaa

SEQ ID NO: 29045 - DNA, 16 bp, Artificial
  oligonucleotide probe
gcgacgagcgagccaa

SEQ ID NO: 29046 - DNA, 16 bp, Artificial
  oligonucleotide probe
cgagcaggcgaggcag

SEQ ID NO: 29047 - DNA, 16 bp, Artificial
  oligonucleotide probe
cgagcaggcgaggcag

SEQ ID NO: 29048 - DNA, 16 bp, Artificial
  oligonucleotide probe
gtccacgctggcgacg

SEQ ID NO: 29049 - DNA, 16 bp, Artificial
  oligonucleotide probe
gtccacgctggcgacg

SEQ ID NO: 29050 - DNA, 16 bp, Artificial
  oligonucleotide probe
acgcggtccaccgtgg

SEQ ID NO: 29051 - DNA, 16 bp, Artificial
  oligonucleotide probe
acgcggtccaccgtgg

SEQ ID NO: 29052 - DNA, 16 bp, Artificial
  oligonucleotide probe
caccgggtggtcagcg

SEQ ID NO: 29053 - DNA, 16 bp, Artificial
  oligonucleotide probe
caccgggtggtcagcg

SEQ ID NO: 29054 - DNA, 16 bp, Artificial
  oligonucleotide probe
gcaggtggtggcgagc

SEQ ID NO: 29055 - DNA, 16 bp, Artificial
  oligonucleotide probe
gcaggtggtggcgagc

SEQ ID NO: 29056 - DNA, 16 bp, Artificial
  oligonucleotide probe
acgcgagcgggtgcag

SEQ ID NO: 29057 - DNA, 16 bp, Artificial
  oligonucleotide probe
acgcgagcgggtgcag

SEQ ID NO: 29058 - DNA, 16 bp, Artificial
  oligonucleotide probe
acgcgggtcaccgtcc

SEQ ID NO: 29059 - DNA, 16 bp, Artificial
  oligonucleotide probe
acgcgggtcaccgtcc

SEQ ID NO: 29060 - DNA, 16 bp, Artificial
  oligonucleotide probe
acgcggtccaccgtgg

SEQ ID NO: 29061 - DNA, 16 bp, Artificial
  oligonucleotide probe
acgcggtccaccgtgg

SEQ ID NO: 29062 - DNA, 16 bp, Artificial
  oligonucleotide probe
gcctcggagacggcag

SEQ ID NO: 29063 - DNA, 16 bp, Artificial
  oligonucleotide probe
gcctcggagacggcag

SEQ ID NO: 29064 - DNA, 16 bp, Artificial
  oligonucleotide probe
acgccaggcgaggtgg

SEQ ID NO: 29065 - DNA, 16 bp, Artificial
  oligonucleotide probe
acgccaggcgaggtgg

SEQ ID NO: 29066 - DNA, 16 bp, Artificial
  oligonucleotide probe
acgcaccagtcccgga

SEQ ID NO: 29067 - DNA, 16 bp, Artificial
  oligonucleotide probe
acgcaccagtcccgga

SEQ ID NO: 29068 - DNA, 16 bp, Artificial
  oligonucleotide probe
gacgcaggcggagggt

SEQ ID NO: 29069 - DNA, 16 bp, Artificial
  oligonucleotide probe
gacgcaggcggagggt

SEQ ID NO: 29070 - DNA, 16 bp, Artificial
  oligonucleotide probe
gacgcaggcggagggt

SEQ ID NO: 29071 - DNA, 16 bp, Artificial
  oligonucleotide probe
gacgcaggcggagggt

SEQ ID NO: 29072 - DNA, 16 bp, Artificial
  oligonucleotide probe
gcctagcgcctcgacg

SEQ ID NO: 29073 - DNA, 16 bp, Artificial
  oligonucleotide probe
gcctagcgcctcgacg

SEQ ID NO: 29074 - DNA, 16 bp, Artificial
  oligonucleotide probe
acgcggtccaccgtgg

SEQ ID NO: 29075 - DNA, 16 bp, Artificial
  oligonucleotide probe
acgcggtccaccgtgg

SEQ ID NO: 29076 - DNA, 16 bp, Artificial
  oligonucleotide probe
gtgggacgacgcgcga

SEQ ID NO: 29077 - DNA, 16 bp, Artificial
  oligonucleotide probe
gtgggacgacgcgcga

SEQ ID NO: 29078 - DNA, 16 bp, Artificial
  oligonucleotide probe
gtggcggaggtcggaa

SEQ ID NO: 29079 - DNA, 16 bp, Artificial
  oligonucleotide probe
gtggcggaggtcggaa

SEQ ID NO: 29080 - DNA, 16 bp, Artificial
  oligonucleotide probe
caggggaagggtcgga

SEQ ID NO: 29081 - DNA, 16 bp, Artificial
  oligonucleotide probe
caggggaagggtcgga

SEQ ID NO: 29082 - DNA, 16 bp, Artificial
  oligonucleotide probe
tggcgtgggggtccaa

SEQ ID NO: 29083 - DNA, 16 bp, Artificial
  oligonucleotide probe
tggcgtgggggtccaa

SEQ ID NO: 29084 - DNA, 16 bp, Artificial
  oligonucleotide probe
caggagcgggaagcga

SEQ ID NO: 29085 - DNA, 16 bp, Artificial
  oligonucleotide probe
caggagcgggaagcga

SEQ ID NO: 29086 - DNA, 16 bp, Artificial
  oligonucleotide probe
ggtccggagcagacgc

SEQ ID NO: 29087 - DNA, 16 bp, Artificial
  oligonucleotide probe
ggtccggagcagacgc

SEQ ID NO: 29088 - DNA, 16 bp, Artificial
  oligonucleotide probe
caccgcgaggtcacgc

SEQ ID NO: 29089 - DNA, 16 bp, Artificial
  oligonucleotide probe
caccgcgaggtcacgc

SEQ ID NO: 29090 - DNA, 16 bp, Artificial
  oligonucleotide probe
gagcggtctggcggaa

SEQ ID NO: 29091 - DNA, 16 bp, Artificial
  oligonucleotide probe
gagcggtctggcggaa

SEQ ID NO: 29092 - DNA, 16 bp, Artificial
  oligonucleotide probe
ggaagcctgcgacgga

SEQ ID NO: 29093 - DNA, 16 bp, Artificial
  oligonucleotide probe
ggaagcctgcgacgga

SEQ ID NO: 29094 - DNA, 16 bp, Artificial
  oligonucleotide probe
caggcacccaggcgga

SEQ ID NO: 29095 - DNA, 16 bp, Artificial
  oligonucleotide probe
caggcacccaggcgga

SEQ ID NO: 29096 - DNA, 16 bp, Artificial
  oligonucleotide probe
ggtcgacgacgccgag

SEQ ID NO: 29097 - DNA, 16 bp, Artificial
  oligonucleotide probe
ggtcgacgacgccgag

SEQ ID NO: 29098 - DNA, 16 bp, Artificial
  oligonucleotide probe
gggttggccgagtggc

SEQ ID NO: 29099 - DNA, 16 bp, Artificial
  oligonucleotide probe
gggttggccgagtggc

SEQ ID NO: 29100 - DNA, 16 bp, Artificial
  oligonucleotide probe
gtggcggaggtcggaa

SEQ ID NO: 29101 - DNA, 16 bp, Artificial
  oligonucleotide probe
gtggcggaggtcggaa

SEQ ID NO: 29102 - DNA, 16 bp, Artificial
  oligonucleotide probe
agcggtccgcgagagc

SEQ ID NO: 29103 - DNA, 16 bp, Artificial
  oligonucleotide probe
agcggtccgcgagagc

SEQ ID NO: 29104 - DNA, 16 bp, Artificial
  oligonucleotide probe
accatggcacgcgacg

SEQ ID NO: 29105 - DNA, 16 bp, Artificial
  oligonucleotide probe
accatggcacgcgacg

SEQ ID NO: 29106 - DNA, 16 bp, Artificial
  oligonucleotide probe
acgcaccagtcccgga

SEQ ID NO: 29107 - DNA, 16 bp, Artificial
  oligonucleotide probe
acgcaccagtcccgga

SEQ ID NO: 29108 - DNA, 16 bp, Artificial
  oligonucleotide probe
caggagcgggaagcga

SEQ ID NO: 29109 - DNA, 16 bp, Artificial
  oligonucleotide probe
caggagcgggaagcga

SEQ ID NO: 29110 - DNA, 16 bp, Artificial
  oligonucleotide probe
gacgcaggcggagggt

SEQ ID NO: 29111 - DNA, 16 bp, Artificial
  oligonucleotide probe
gacgcaggcggagggt

SEQ ID NO: 29112 - DNA, 16 bp, Artificial
  oligonucleotide probe
tgctgggtgcaggcga

SEQ ID NO: 29113 - DNA, 16 bp, Artificial
  oligonucleotide probe
tgctgggtgcaggcga

SEQ ID NO: 29114 - DNA, 16 bp, Artificial
  oligonucleotide probe
gacggcgagtgggcag

SEQ ID NO: 29115 - DNA, 16 bp, Artificial
  oligonucleotide probe
gacggcgagtgggcag

SEQ ID NO: 29116 - DNA, 16 bp, Artificial
  oligonucleotide probe
caccgggtggtcagcg

SEQ ID NO: 29117 - DNA, 16 bp, Artificial
  oligonucleotide probe
caccgggtggtcagcg

SEQ ID NO: 29118 - DNA, 16 bp, Artificial
  oligonucleotide probe
gtccggaagtgggcga

SEQ ID NO: 29119 - DNA, 16 bp, Artificial
  oligonucleotide probe
gtccggaagtgggcga

SEQ ID NO: 29120 - DNA, 16 bp, Artificial
  oligonucleotide probe
tggcgtgggggtccaa

SEQ ID NO: 29121 - DNA, 16 bp, Artificial
  oligonucleotide probe
tggcgtgggggtccaa

SEQ ID NO: 29122 - DNA, 16 bp, Artificial
  oligonucleotide probe
accacggaagcgcgga

SEQ ID NO: 29123 - DNA, 16 bp, Artificial
  oligonucleotide probe
accacggaagcgcgga

SEQ ID NO: 29124 - DNA, 16 bp, Artificial
  oligonucleotide probe
acgcggtccaccgtgg

SEQ ID NO: 29125 - DNA, 16 bp, Artificial
  oligonucleotide probe
acgcggtccaccgtgg

SEQ ID NO: 29126 - DNA, 16 bp, Artificial
  oligonucleotide probe
gacggggtcggacgag

SEQ ID NO: 29127 - DNA, 16 bp, Artificial
  oligonucleotide probe
gacggggtcggacgag

SEQ ID NO: 29128 - DNA, 16 bp, Artificial
  oligonucleotide probe
tgctcggatgctgcga

SEQ ID NO: 29129 - DNA, 16 bp, Artificial
  oligonucleotide probe
gagcgcagccaagcct

SEQ ID NO: 29130 - DNA, 16 bp, Artificial
  oligonucleotide probe
caccgacgggaaacgc

SEQ ID NO: 29131 - DNA, 16 bp, Artificial
  oligonucleotide probe
caccgacgggaaacgc

SEQ ID NO: 29132 - DNA, 16 bp, Artificial
  oligonucleotide probe
caccgagccacccgga

SEQ ID NO: 29133 - DNA, 16 bp, Artificial
  oligonucleotide probe
caccgagccacccgga

SEQ ID NO: 29134 - DNA, 16 bp, Artificial
  oligonucleotide probe
caggggaagggtcgga

SEQ ID NO: 29135 - DNA, 16 bp, Artificial
  oligonucleotide probe
caggggaagggtcgga

SEQ ID NO: 29136 - DNA, 16 bp, Artificial
  oligonucleotide probe
agcggtccgcgagagc

SEQ ID NO: 29137 - DNA, 16 bp, Artificial
  oligonucleotide probe
agcggtccgcgagagc

SEQ ID NO: 29138 - DNA, 16 bp, Artificial
  oligonucleotide probe
tggcgtgggggtccaa

SEQ ID NO: 29139 - DNA, 16 bp, Artificial
  oligonucleotide probe
tggcgtgggggtccaa

SEQ ID NO: 29140 - DNA, 16 bp, Artificial
  oligonucleotide probe
gacggcgagtgggcag

SEQ ID NO: 29141 - DNA, 16 bp, Artificial
  oligonucleotide probe
gacggcgagtgggcag

SEQ ID NO: 29142 - DNA, 16 bp, Artificial
  oligonucleotide probe
gcctagcgcctcgacg

SEQ ID NO: 29143 - DNA, 16 bp, Artificial
  oligonucleotide probe
gcctagcgcctcgacg

SEQ ID NO: 29144 - DNA, 16 bp, Artificial
  oligonucleotide probe
gcaggcagccaatggc

SEQ ID NO: 29145 - DNA, 16 bp, Artificial
  oligonucleotide probe
gcaggcagccaatggc

SEQ ID NO: 29146 - DNA, 16 bp, Artificial
  oligonucleotide probe
gacgcaggcggagggt

SEQ ID NO: 29147 - DNA, 16 bp, Artificial
  oligonucleotide probe
gacgcaggcggagggt

SEQ ID NO: 29148 - DNA, 16 bp, Artificial
  oligonucleotide probe
ggaagcctgcgacgga

SEQ ID NO: 29149 - DNA, 16 bp, Artificial
  oligonucleotide probe
ggaagcctgcgacgga

SEQ ID NO: 29150 - DNA, 16 bp, Artificial
  oligonucleotide probe
gcgaagcggcgaggtc

SEQ ID NO: 29151 - DNA, 16 bp, Artificial
  oligonucleotide probe
gcgaagcggcgaggtc

SEQ ID NO: 29152 - DNA, 16 bp, Artificial
  oligonucleotide probe
agcggtccgcgagagc

SEQ ID NO: 29153 - DNA, 16 bp, Artificial
  oligonucleotide probe
agcggtccgcgagagc

SEQ ID NO: 29154 - DNA, 16 bp, Artificial
  oligonucleotide probe
gacgcaggcggagggt

SEQ ID NO: 29155 - DNA, 16 bp, Artificial
  oligonucleotide probe
gacgcaggcggagggt

SEQ ID NO: 29156 - DNA, 16 bp, Artificial
  oligonucleotide probe
tcacgccttggccacc

SEQ ID NO: 29157 - DNA, 16 bp, Artificial
  oligonucleotide probe
tcacgccttggccacc

SEQ ID NO: 29158 - DNA, 16 bp, Artificial
  oligonucleotide probe
gcctgtgggtccgcga

SEQ ID NO: 29159 - DNA, 16 bp, Artificial
  oligonucleotide probe
gcctgtgggtccgcga

SEQ ID NO: 29160 - DNA, 16 bp, Artificial
  oligonucleotide probe
acgcaccagtcccgga

SEQ ID NO: 29161 - DNA, 16 bp, Artificial
  oligonucleotide probe
acgcaccagtcccgga

SEQ ID NO: 29162 - DNA, 16 bp, Artificial
  oligonucleotide probe
gcagcctctggccgag

SEQ ID NO: 29163 - DNA, 16 bp, Artificial
  oligonucleotide probe
gcagcctctggccgag

SEQ ID NO: 29164 - DNA, 16 bp, Artificial
  oligonucleotide probe
gacggcgagtgggcag

SEQ ID NO: 29165 - DNA, 16 bp, Artificial
  oligonucleotide probe
gacggcgagtgggcag

SEQ ID NO: 29166 - DNA, 16 bp, Artificial
  oligonucleotide probe
gtccggaagtgggcga

SEQ ID NO: 29167 - DNA, 16 bp, Artificial
  oligonucleotide probe
gtccggaagtgggcga

SEQ ID NO: 29168 - DNA, 16 bp, Artificial
  oligonucleotide probe
acgccaggcgaggtgg

SEQ ID NO: 29169 - DNA, 16 bp, Artificial
  oligonucleotide probe
acgccaggcgaggtgg

SEQ ID NO: 29170 - DNA, 16 bp, Artificial
  oligonucleotide probe
ggaaagcggcctggaa

SEQ ID NO: 29171 - DNA, 16 bp, Artificial
  oligonucleotide probe
ggaaagcggcctggaa

SEQ ID NO: 29172 - DNA, 16 bp, Artificial
  oligonucleotide probe
acgcaccagtcccgga

SEQ ID NO: 29173 - DNA, 16 bp, Artificial
  oligonucleotide probe
acgcaccagtcccgga

SEQ ID NO: 29174 - DNA, 16 bp, Artificial
  oligonucleotide probe
cctcagcgcggaacca

SEQ ID NO: 29175 - DNA, 16 bp, Artificial
  oligonucleotide probe
cctcagcgcggaacca

SEQ ID NO: 29176 - DNA, 16 bp, Artificial
  oligonucleotide probe
caggggaagggtcgga

SEQ ID NO: 29177 - DNA, 16 bp, Artificial
  oligonucleotide probe
caggggaagggtcgga

SEQ ID NO: 29178 - DNA, 16 bp, Artificial
  oligonucleotide probe
acgcgagcgggtgcag

SEQ ID NO: 29179 - DNA, 16 bp, Artificial
  oligonucleotide probe
acgcgagcgggtgcag

SEQ ID NO: 29180 - DNA, 16 bp, Artificial
  oligonucleotide probe
cctcgcctcgaggagc

SEQ ID NO: 29181 - DNA, 16 bp, Artificial
  oligonucleotide probe
cctcgcctcgaggagc

SEQ ID NO: 29182 - DNA, 16 bp, Artificial
  oligonucleotide probe
gcgagtggcagggcct

SEQ ID NO: 29183 - DNA, 16 bp, Artificial
  oligonucleotide probe
gcgagtggcagggcct

SEQ ID NO: 29184 - DNA, 16 bp, Artificial
  oligonucleotide probe
gcaggcagccaatggc

SEQ ID NO: 29185 - DNA, 16 bp, Artificial
  oligonucleotide probe
gcaggcagccaatggc

SEQ ID NO: 29186 - DNA, 16 bp, Artificial
  oligonucleotide probe
gcgacgagcgagccaa

SEQ ID NO: 29187 - DNA, 16 bp, Artificial
  oligonucleotide probe
gcgacgagcgagccaa

SEQ ID NO: 29188 - DNA, 16 bp, Artificial
  oligonucleotide probe
gcaggtggtggcgagc

SEQ ID NO: 29189 - DNA, 16 bp, Artificial
  oligonucleotide probe
gcaggtggtggcgagc

SEQ ID NO: 29190 - DNA, 16 bp, Artificial
  oligonucleotide probe
caccgggtggtcagcg

SEQ ID NO: 29191 - DNA, 16 bp, Artificial
  oligonucleotide probe
caccgggtggtcagcg

SEQ ID NO: 29192 - DNA, 16 bp, Artificial
  oligonucleotide probe
acgccaggcgaggtgg

SEQ ID NO: 29193 - DNA, 16 bp, Artificial
  oligonucleotide probe
acgccaggcgaggtgg

SEQ ID NO: 29194 - DNA, 16 bp, Artificial
  oligonucleotide probe
gacgcaggcggagggt

SEQ ID NO: 29195 - DNA, 16 bp, Artificial
  oligonucleotide probe
gacgcaggcggagggt

SEQ ID NO: 29196 - DNA, 16 bp, Artificial
  oligonucleotide probe
gacggcgagtgggcag

SEQ ID NO: 29197 - DNA, 16 bp, Artificial
  oligonucleotide probe
gacggcgagtgggcag

SEQ ID NO: 29198 - DNA, 16 bp, Artificial
  oligonucleotide probe
gcagcggagcctgagc

SEQ ID NO: 29199 - DNA, 16 bp, Artificial
  oligonucleotide probe
gcagcggagcctgagc

SEQ ID NO: 29200 - DNA, 16 bp, Artificial
  oligonucleotide probe
gcctgtgggtccgcga

SEQ ID NO: 29201 - DNA, 16 bp, Artificial
  oligonucleotide probe
gcctgtgggtccgcga

SEQ ID NO: 29202 - DNA, 16 bp, Artificial
  oligonucleotide probe
caggcacccaggcgga

SEQ ID NO: 29203 - DNA, 16 bp, Artificial
  oligonucleotide probe
caggcacccaggcgga

SEQ ID NO: 29204 - DNA, 16 bp, Artificial
  oligonucleotide probe
cctctggctggcccaa

SEQ ID NO: 29205 - DNA, 16 bp, Artificial
  oligonucleotide probe
cctctggctggcccaa

SEQ ID NO: 29206 - DNA, 16 bp, Artificial
  oligonucleotide probe
gtccacgctggcgacg

SEQ ID NO: 29207 - DNA, 16 bp, Artificial
  oligonucleotide probe
gtccacgctggcgacg

SEQ ID NO: 29208 - DNA, 16 bp, Artificial
  oligonucleotide probe
gcctagcgcctcgacg

SEQ ID NO: 29209 - DNA, 16 bp, Artificial
  oligonucleotide probe
gcctagcgcctcgacg

SEQ ID NO: 29210 - DNA, 16 bp, Artificial
  oligonucleotide probe
acgcggaagacgtggc

SEQ ID NO: 29211 - DNA, 16 bp, Artificial
  oligonucleotide probe
acgcggaagacgtggc

SEQ ID NO: 29212 - DNA, 16 bp, Artificial
  oligonucleotide probe
acgcggtccaccgtgg

SEQ ID NO: 29213 - DNA, 16 bp, Artificial
  oligonucleotide probe
acgcggtccaccgtgg

SEQ ID NO: 29214 - DNA, 16 bp, Artificial
  oligonucleotide probe
caccgggtggtcagcg

SEQ ID NO: 29215 - DNA, 16 bp, Artificial
  oligonucleotide probe
caccgggtggtcagcg

SEQ ID NO: 29216 - DNA, 16 bp, Artificial
  oligonucleotide probe
caccgacgggaaacgc

SEQ ID NO: 29217 - DNA, 16 bp, Artificial
  oligonucleotide probe
caccgacgggaaacgc

SEQ ID NO: 29218 - DNA, 16 bp, Artificial
  oligonucleotide probe
gacggcgagtgggcag

SEQ ID NO: 29219 - DNA, 16 bp, Artificial
  oligonucleotide probe
gacggcgagtgggcag

SEQ ID NO: 29220 - DNA, 16 bp, Artificial
  oligonucleotide probe
gacgcaggcggagggt

SEQ ID NO: 29221 - DNA, 16 bp, Artificial
  oligonucleotide probe
gacgcaggcggagggt

SEQ ID NO: 29222 - DNA, 16 bp, Artificial
  oligonucleotide probe
cggacaggacgctggc

SEQ ID NO: 29223 - DNA, 16 bp, Artificial
  oligonucleotide probe
cggacaggacgctggc

SEQ ID NO: 29224 - DNA, 16 bp, Artificial
  oligonucleotide probe
caccgcgaggtcacgc

SEQ ID NO: 29225 - DNA, 16 bp, Artificial
  oligonucleotide probe
caccgcgaggtcacgc

SEQ ID NO: 29226 - DNA, 16 bp, Artificial
  oligonucleotide probe
cctctggctggcccaa

SEQ ID NO: 29227 - DNA, 16 bp, Artificial
  oligonucleotide probe
cctctggctggcccaa

SEQ ID NO: 29228 - DNA, 16 bp, Artificial
  oligonucleotide probe
gggtggaacgaggcga

SEQ ID NO: 29229 - DNA, 16 bp, Artificial
  oligonucleotide probe
gggtggaacgaggcga

SEQ ID NO: 29230 - DNA, 16 bp, Artificial
  oligonucleotide probe
gacgcaggcggagggt

SEQ ID NO: 29231 - DNA, 16 bp, Artificial
  oligonucleotide probe
gacgcaggcggagggt

SEQ ID NO: 29232 - DNA, 16 bp, Artificial
  oligonucleotide probe
agcgagcggtggacgc

SEQ ID NO: 29233 - DNA, 16 bp, Artificial
  oligonucleotide probe
agcgagcggtggacgc

SEQ ID NO: 29234 - DNA, 16 bp, Artificial
  oligonucleotide probe
acgcggtccaccgtgg

SEQ ID NO: 29235 - DNA, 16 bp, Artificial
  oligonucleotide probe
acgcggtccaccgtgg

SEQ ID NO: 29236 - DNA, 16 bp, Artificial
  oligonucleotide probe
gacggacgacgcgtgg

SEQ ID NO: 29237 - DNA, 16 bp, Artificial
  oligonucleotide probe
gacggacgacgcgtgg

SEQ ID NO: 29238 - DNA, 16 bp, Artificial
  oligonucleotide probe
gacgcaggcggagggt

SEQ ID NO: 29239 - DNA, 16 bp, Artificial
  oligonucleotide probe
gacgcaggcggagggt

SEQ ID NO: 29240 - DNA, 16 bp, Artificial
  oligonucleotide probe
ggaagcctgcgacgga

SEQ ID NO: 29241 - DNA, 16 bp, Artificial
  oligonucleotide probe
ggaagcctgcgacgga

SEQ ID NO: 29242 - DNA, 16 bp, Artificial
  oligonucleotide probe
acgcgggtcaccgtcc

SEQ ID NO: 29243 - DNA, 16 bp, Artificial
  oligonucleotide probe
acgcgggtcaccgtcc

SEQ ID NO: 29244 - DNA, 16 bp, Artificial
  oligonucleotide probe
tcacgccttggccacc

SEQ ID NO: 29245 - DNA, 16 bp, Artificial
  oligonucleotide probe
tcacgccttggccacc

SEQ ID NO: 29246 - DNA, 16 bp, Artificial
  oligonucleotide probe
acgcaccagtcccgga

SEQ ID NO: 29247 - DNA, 16 bp, Artificial
  oligonucleotide probe
acgcaccagtcccgga

SEQ ID NO: 29248 - DNA, 16 bp, Artificial
  oligonucleotide probe
gcctcggagacggcag

SEQ ID NO: 29249 - DNA, 16 bp, Artificial
  oligonucleotide probe
gcctcggagacggcag

SEQ ID NO: 29250 - DNA, 16 bp, Artificial
  oligonucleotide probe
agcggtccgcgagagc

SEQ ID NO: 29251 - DNA, 16 bp, Artificial
  oligonucleotide probe
agcggtccgcgagagc

SEQ ID NO: 29252 - DNA, 16 bp, Artificial
  oligonucleotide probe
gcaggtggtggcgagc

SEQ ID NO: 29253 - DNA, 16 bp, Artificial
  oligonucleotide probe
gcaggtggtggcgagc

SEQ ID NO: 29254 - DNA, 16 bp, Artificial
  oligonucleotide probe
acgcggaagacgtggc

SEQ ID NO: 29255 - DNA, 16 bp, Artificial
  oligonucleotide probe
acgcggaagacgtggc

SEQ ID NO: 29256 - DNA, 16 bp, Artificial
  oligonucleotide probe
tggcgtgggggtccaa

SEQ ID NO: 29257 - DNA, 16 bp, Artificial
  oligonucleotide probe
tggcgtgggggtccaa

SEQ ID NO: 29258 - DNA, 16 bp, Artificial
  oligonucleotide probe
tcacgccttggccacc

SEQ ID NO: 29259 - DNA, 16 bp, Artificial
  oligonucleotide probe
tcacgccttggccacc

SEQ ID NO: 29260 - DNA, 16 bp, Artificial
  oligonucleotide probe
accatggcacgcgacg

SEQ ID NO: 29261 - DNA, 16 bp, Artificial
  oligonucleotide probe
accatggcacgcgacg

SEQ ID NO: 29262 - DNA, 16 bp, Artificial
  oligonucleotide probe
gtccgagcagcggcct

SEQ ID NO: 29263 - DNA, 16 bp, Artificial
  oligonucleotide probe
gtccgagcagcggcct

SEQ ID NO: 29264 - DNA, 16 bp, Artificial
  oligonucleotide probe
gcctcggagacggcag

SEQ ID NO: 29265 - DNA, 16 bp, Artificial
  oligonucleotide probe
gcctcggagacggcag

SEQ ID NO: 29266 - DNA, 16 bp, Artificial
  oligonucleotide probe
gcctagcgcctcgacg

SEQ ID NO: 29267 - DNA, 16 bp, Artificial
  oligonucleotide probe
gcctagcgcctcgacg

SEQ ID NO: 29268 - DNA, 16 bp, Artificial
  oligonucleotide probe
tgctgggtgcaggcga

SEQ ID NO: 29269 - DNA, 16 bp, Artificial
  oligonucleotide probe
tgctgggtgcaggcga

SEQ ID NO: 29270 - DNA, 16 bp, Artificial
  oligonucleotide probe
ggtcgacgacgccgag

SEQ ID NO: 29271 - DNA, 16 bp, Artificial
  oligonucleotide probe
ggtcgacgacgccgag

SEQ ID NO: 29272 - DNA, 16 bp, Artificial
  oligonucleotide probe
agcggtccgcgagagc

SEQ ID NO: 29273 - DNA, 16 bp, Artificial
  oligonucleotide probe
agcggtccgcgagagc

SEQ ID NO: 29274 - DNA, 16 bp, Artificial
  oligonucleotide probe
ggtcgacgacgccgag

SEQ ID NO: 29275 - DNA, 16 bp, Artificial
  oligonucleotide probe
ggtcgacgacgccgag

SEQ ID NO: 29276 - DNA, 16 bp, Artificial
  oligonucleotide probe
gacgcaggcggagggt

SEQ ID NO: 29277 - DNA, 16 bp, Artificial
  oligonucleotide probe
gacgcaggcggagggt

SEQ ID NO: 29278 - DNA, 16 bp, Artificial
  oligonucleotide probe
gagcgcgacacccagg

SEQ ID NO: 29279 - DNA, 16 bp, Artificial
  oligonucleotide probe
gagcgcgacacccagg

SEQ ID NO: 29280 - DNA, 16 bp, Artificial
  oligonucleotide probe
ggtccggagcagacgc

SEQ ID NO: 29281 - DNA, 16 bp, Artificial
  oligonucleotide probe
ggtccggagcagacgc

SEQ ID NO: 29282 - DNA, 16 bp, Artificial
  oligonucleotide probe
tgctgggtgcaggcga

SEQ ID NO: 29283 - DNA, 16 bp, Artificial
  oligonucleotide probe
tgctgggtgcaggcga

SEQ ID NO: 29284 - DNA, 16 bp, Artificial
  oligonucleotide probe
tggcagcgggtcgtgg

SEQ ID NO: 29285 - DNA, 16 bp, Artificial
  oligonucleotide probe
tggcagcgggtcgtgg

SEQ ID NO: 29286 - DNA, 16 bp, Artificial
  oligonucleotide probe
tggcagcgggtcgtgg

SEQ ID NO: 29287 - DNA, 16 bp, Artificial
  oligonucleotide probe
tggcagcgggtcgtgg

SEQ ID NO: 29288 - DNA, 16 bp, Artificial
  oligonucleotide probe
gcgacgagcgagccaa

SEQ ID NO: 29289 - DNA, 16 bp, Artificial
  oligonucleotide probe
gcgacgagcgagccaa

SEQ ID NO: 29290 - DNA, 16 bp, Artificial
  oligonucleotide probe
tgctgggtgcaggcga

SEQ ID NO: 29291 - DNA, 16 bp, Artificial
  oligonucleotide probe
tgctgggtgcaggcga

SEQ ID NO: 29292 - DNA, 16 bp, Artificial
  oligonucleotide probe
gacggcgagtgggcag

SEQ ID NO: 29293 - DNA, 16 bp, Artificial
  oligonucleotide probe
gacggcgagtgggcag

SEQ ID NO: 29294 - DNA, 16 bp, Artificial
  oligonucleotide probe
gacgcaggcggagggt

SEQ ID NO: 29295 - DNA, 16 bp, Artificial
  oligonucleotide probe
gacgcaggcggagggt

SEQ ID NO: 29296 - DNA, 16 bp, Artificial
  oligonucleotide probe
acgcaccagtcccgga

SEQ ID NO: 29297 - DNA, 16 bp, Artificial
  oligonucleotide probe
acgcaccagtcccgga

SEQ ID NO: 29298 - DNA, 16 bp, Artificial
  oligonucleotide probe
gtccacgctggcgacg

SEQ ID NO: 29299 - DNA, 16 bp, Artificial
  oligonucleotide probe
gtccacgctggcgacg

SEQ ID NO: 29300 - DNA, 16 bp, Artificial
  oligonucleotide probe
accatggcacgcgacg

SEQ ID NO: 29301 - DNA, 16 bp, Artificial
  oligonucleotide probe
accatggcacgcgacg

SEQ ID NO: 29302 - DNA, 16 bp, Artificial
  oligonucleotide probe
gcctcggagacggcag

SEQ ID NO: 29303 - DNA, 16 bp, Artificial
  oligonucleotide probe
gcctcggagacggcag

SEQ ID NO: 29304 - DNA, 16 bp, Artificial
  oligonucleotide probe
caccgacgggaaacgc

SEQ ID NO: 29305 - DNA, 16 bp, Artificial
  oligonucleotide probe
caccgacgggaaacgc

SEQ ID NO: 29306 - DNA, 16 bp, Artificial
  oligonucleotide probe
ggtcgacgacgccgag

SEQ ID NO: 29307 - DNA, 16 bp, Artificial
  oligonucleotide probe
ggtcgacgacgccgag

SEQ ID NO: 29308 - DNA, 16 bp, Artificial
  oligonucleotide probe
gggtggaacgaggcga

SEQ ID NO: 29309 - DNA, 16 bp, Artificial
  oligonucleotide probe
gggtggaacgaggcga

SEQ ID NO: 29310 - DNA, 16 bp, Artificial
  oligonucleotide probe
tggcgtgggggtccaa

SEQ ID NO: 29311 - DNA, 16 bp, Artificial
  oligonucleotide probe
tggcgtgggggtccaa

SEQ ID NO: 29312 - DNA, 16 bp, Artificial
  oligonucleotide probe
gcctcggagacggcag

SEQ ID NO: 29313 - DNA, 16 bp, Artificial
  oligonucleotide probe
gcctcggagacggcag

SEQ ID NO: 29314 - DNA, 16 bp, Artificial
  oligonucleotide probe
tggccaggcggagtgg

SEQ ID NO: 29315 - DNA, 16 bp, Artificial
  oligonucleotide probe
tggccaggcggagtgg

SEQ ID NO: 29316 - DNA, 16 bp, Artificial
  oligonucleotide probe
gacggcgagtgggcag

SEQ ID NO: 29317 - DNA, 16 bp, Artificial
  oligonucleotide probe
gacggcgagtgggcag

SEQ ID NO: 29318 - DNA, 16 bp, Artificial
  oligonucleotide probe
gcagcggagcctgagc

SEQ ID NO: 29319 - DNA, 16 bp, Artificial
  oligonucleotide probe
gcagcggagcctgagc

SEQ ID NO: 29320 - DNA, 16 bp, Artificial
  oligonucleotide probe
gcagcaccagcgtggc

SEQ ID NO: 29321 - DNA, 16 bp, Artificial
  oligonucleotide probe
gcagcaccagcgtggc

SEQ ID NO: 29322 - DNA, 16 bp, Artificial
  oligonucleotide probe
tggcgtgggggtccaa

SEQ ID NO: 29323 - DNA, 16 bp, Artificial
  oligonucleotide probe
tggcgtgggggtccaa

SEQ ID NO: 29324 - DNA, 16 bp, Artificial
  oligonucleotide probe
acgcaccagtcccgga

SEQ ID NO: 29325 - DNA, 16 bp, Artificial
  oligonucleotide probe
acgcaccagtcccgga

SEQ ID NO: 29326 - DNA, 16 bp, Artificial
  oligonucleotide probe
tgctgggtgcaggcga

SEQ ID NO: 29327 - DNA, 16 bp, Artificial
  oligonucleotide probe
tgctgggtgcaggcga

SEQ ID NO: 29328 - DNA, 16 bp, Artificial
  oligonucleotide probe
tggccaggcggagtgg

SEQ ID NO: 29329 - DNA, 16 bp, Artificial
  oligonucleotide probe
tggccaggcggagtgg

SEQ ID NO: 29330 - DNA, 16 bp, Artificial
  oligonucleotide probe
agcgccaatcacgggt

SEQ ID NO: 29331 - DNA, 16 bp, Artificial
  oligonucleotide probe
agcgccaatcacgggt

SEQ ID NO: 29332 - DNA, 16 bp, Artificial
  oligonucleotide probe
gtccggaagtgggcga

SEQ ID NO: 29333 - DNA, 16 bp, Artificial
  oligonucleotide probe
gtccggaagtgggcga

SEQ ID NO: 29334 - DNA, 16 bp, Artificial
  oligonucleotide probe
gacggcgagtgggcag

SEQ ID NO: 29335 - DNA, 16 bp, Artificial
  oligonucleotide probe
gacggcgagtgggcag

SEQ ID NO: 29336 - DNA, 16 bp, Artificial
  oligonucleotide probe
cctctggctggcccaa

SEQ ID NO: 29337 - DNA, 16 bp, Artificial
  oligonucleotide probe
cctctggctggcccaa

SEQ ID NO: 29338 - DNA, 16 bp, Artificial
  oligonucleotide probe
cctcagcgcggaacca

SEQ ID NO: 29339 - DNA, 16 bp, Artificial
  oligonucleotide probe
cctcagcgcggaacca

SEQ ID NO: 29340 - DNA, 16 bp, Artificial
  oligonucleotide probe
ggtcgacgacgccgag

SEQ ID NO: 29341 - DNA, 16 bp, Artificial
  oligonucleotide probe
ggtcgacgacgccgag

SEQ ID NO: 29342 - DNA, 16 bp, Artificial
  oligonucleotide probe
gcgaagcggcgaggtc

SEQ ID NO: 29343 - DNA, 16 bp, Artificial
  oligonucleotide probe
gcgaagcggcgaggtc

SEQ ID NO: 29344 - DNA, 16 bp, Artificial
  oligonucleotide probe
acgcggtccaccgtgg

SEQ ID NO: 29345 - DNA, 16 bp, Artificial
  oligonucleotide probe
acgcggtccaccgtgg

SEQ ID NO: 29346 - DNA, 16 bp, Artificial
  oligonucleotide probe
gcagcggagcctgagc

SEQ ID NO: 29347 - DNA, 16 bp, Artificial
  oligonucleotide probe
gcagcggagcctgagc

SEQ ID NO: 29348 - DNA, 16 bp, Artificial
  oligonucleotide probe
gcgacgagcgagccaa

SEQ ID NO: 29349 - DNA, 16 bp, Artificial
  oligonucleotide probe
gcgacgagcgagccaa

SEQ ID NO: 29350 - DNA, 16 bp, Artificial
  oligonucleotide probe
ggtccggagcagacgc

SEQ ID NO: 29351 - DNA, 16 bp, Artificial
  oligonucleotide probe
ggtccggagcagacgc

SEQ ID NO: 29352 - DNA, 16 bp, Artificial
  oligonucleotide probe
caccgacgggaaacgc

SEQ ID NO: 29353 - DNA, 16 bp, Artificial
  oligonucleotide probe
caccgacgggaaacgc

SEQ ID NO: 29354 - DNA, 16 bp, Artificial
  oligonucleotide probe
acgccaggcgaggtgg

SEQ ID NO: 29355 - DNA, 16 bp, Artificial
  oligonucleotide probe
acgccaggcgaggtgg

SEQ ID NO: 29356 - DNA, 16 bp, Artificial
  oligonucleotide probe
gcagcggagcctgagc

SEQ ID NO: 29357 - DNA, 16 bp, Artificial
  oligonucleotide probe
gcagcggagcctgagc

SEQ ID NO: 29358 - DNA, 16 bp, Artificial
  oligonucleotide probe
tggcacgcgagccagg

SEQ ID NO: 29359 - DNA, 16 bp, Artificial
  oligonucleotide probe
tggcacgcgagccagg

SEQ ID NO: 29360 - DNA, 16 bp, Artificial
  oligonucleotide probe
acgcggtccaccgtgg

SEQ ID NO: 29361 - DNA, 16 bp, Artificial
  oligonucleotide probe
acgcggtccaccgtgg

SEQ ID NO: 29362 - DNA, 16 bp, Artificial
  oligonucleotide probe
gcctagcgcctcgacg

SEQ ID NO: 29363 - DNA, 16 bp, Artificial
  oligonucleotide probe
gcctagcgcctcgacg

SEQ ID NO: 29364 - DNA, 16 bp, Artificial
  oligonucleotide probe
gagcgcgacacccagg

SEQ ID NO: 29365 - DNA, 16 bp, Artificial
  oligonucleotide probe
gagcgcgacacccagg

SEQ ID NO: 29366 - DNA, 16 bp, Artificial
  oligonucleotide probe
gcagcctctggccgag

SEQ ID NO: 29367 - DNA, 16 bp, Artificial
  oligonucleotide probe
gcagcctctggccgag

SEQ ID NO: 29368 - DNA, 16 bp, Artificial
  oligonucleotide probe
gtccgagcagcggcct

SEQ ID NO: 29369 - DNA, 16 bp, Artificial
  oligonucleotide probe
gtccgagcagcggcct

SEQ ID NO: 29370 - DNA, 16 bp, Artificial
  oligonucleotide probe
ggaaagcggcctggaa

SEQ ID NO: 29371 - DNA, 16 bp, Artificial
  oligonucleotide probe
ggaaagcggcctggaa

SEQ ID NO: 29372 - DNA, 16 bp, Artificial
  oligonucleotide probe
cagggcagggtcgggt

SEQ ID NO: 29373 - DNA, 16 bp, Artificial
  oligonucleotide probe
cagggcagggtcgggt

SEQ ID NO: 29374 - DNA, 16 bp, Artificial
  oligonucleotide probe
tggcagcgggtcgtgg

SEQ ID NO: 29375 - DNA, 16 bp, Artificial
  oligonucleotide probe
tggcagcgggtcgtgg

SEQ ID NO: 29376 - DNA, 16 bp, Artificial
  oligonucleotide probe
gagcgcctcctcgagc

SEQ ID NO: 29377 - DNA, 16 bp, Artificial
  oligonucleotide probe
gagcgcctcctcgagc

SEQ ID NO: 29378 - DNA, 16 bp, Artificial
  oligonucleotide probe
gcgagtggcagggcct

SEQ ID NO: 29379 - DNA, 16 bp, Artificial
  oligonucleotide probe
gcgagtggcagggcct

SEQ ID NO: 29380 - DNA, 16 bp, Artificial
  oligonucleotide probe
gcagcggagcctgagc

SEQ ID NO: 29381 - DNA, 16 bp, Artificial
  oligonucleotide probe
gcagcggagcctgagc

SEQ ID NO: 29382 - DNA, 16 bp, Artificial
  oligonucleotide probe
gacggacgacgcgtgg

SEQ ID NO: 29383 - DNA, 16 bp, Artificial
  oligonucleotide probe
gacggacgacgcgtgg

SEQ ID NO: 29384 - DNA, 16 bp, Artificial
  oligonucleotide probe
acgccaggcgaggtgg

SEQ ID NO: 29385 - DNA, 16 bp, Artificial
  oligonucleotide probe
acgccaggcgaggtgg

SEQ ID NO: 29386 - DNA, 16 bp, Artificial
  oligonucleotide probe
ggtccggagcagacgc

SEQ ID NO: 29387 - DNA, 16 bp, Artificial
  oligonucleotide probe
ggtccggagcagacgc

SEQ ID NO: 29388 - DNA, 16 bp, Artificial
  oligonucleotide probe
gagcgcgacacccagg

SEQ ID NO: 29389 - DNA, 16 bp, Artificial
  oligonucleotide probe
gagcgcgacacccagg

SEQ ID NO: 29390 - DNA, 16 bp, Artificial
  oligonucleotide probe
gcctgggtcaccacgc

SEQ ID NO: 29391 - DNA, 16 bp, Artificial
  oligonucleotide probe
gcctgggtcaccacgc

SEQ ID NO: 29392 - DNA, 16 bp, Artificial
  oligonucleotide probe
acgccaggcgaggtgg

SEQ ID NO: 29393 - DNA, 16 bp, Artificial
  oligonucleotide probe
acgccaggcgaggtgg

SEQ ID NO: 29394 - DNA, 16 bp, Artificial
  oligonucleotide probe
gcagcggagcctgagc

SEQ ID NO: 29395 - DNA, 16 bp, Artificial
  oligonucleotide probe
gcagcggagcctgagc

SEQ ID NO: 29396 - DNA, 16 bp, Artificial
  oligonucleotide probe
gacggcgagtgggcag

SEQ ID NO: 29397 - DNA, 16 bp, Artificial
  oligonucleotide probe
gacggcgagtgggcag

SEQ ID NO: 29398 - DNA, 16 bp, Artificial
  oligonucleotide probe
agcggtccgcgagagc

SEQ ID NO: 29399 - DNA, 16 bp, Artificial
  oligonucleotide probe
agcggtccgcgagagc

SEQ ID NO: 29400 - DNA, 16 bp, Artificial
  oligonucleotide probe
gggtggaacgaggcga

SEQ ID NO: 29401 - DNA, 16 bp, Artificial
  oligonucleotide probe
gggtggaacgaggcga

SEQ ID NO: 29402 - DNA, 16 bp, Artificial
  oligonucleotide probe
acgcggtccaccgtgg

SEQ ID NO: 29403 - DNA, 16 bp, Artificial
  oligonucleotide probe
acgcggtccaccgtgg

SEQ ID NO: 29404 - DNA, 16 bp, Artificial
  oligonucleotide probe
gcctcggagacggcag

SEQ ID NO: 29405 - DNA, 16 bp, Artificial
  oligonucleotide probe
gcctcggagacggcag

SEQ ID NO: 29406 - DNA, 16 bp, Artificial
  oligonucleotide probe
ggtcgacgacgccgag

SEQ ID NO: 29407 - DNA, 16 bp, Artificial
  oligonucleotide probe
ggtcgacgacgccgag

SEQ ID NO: 29408 - DNA, 16 bp, Artificial
  oligonucleotide probe
gtccgagcagcggcct

SEQ ID NO: 29409 - DNA, 16 bp, Artificial
  oligonucleotide probe
gtccgagcagcggcct

SEQ ID NO: 29410 - DNA, 16 bp, Artificial
  oligonucleotide probe
acgcggaagacgtggc

SEQ ID NO: 29411 - DNA, 16 bp, Artificial
  oligonucleotide probe
acgcggaagacgtggc

SEQ ID NO: 29412 - DNA, 16 bp, Artificial
  oligonucleotide probe
tgctgggtgcaggcga

SEQ ID NO: 29413 - DNA, 16 bp, Artificial
  oligonucleotide probe
tgctgggtgcaggcga

SEQ ID NO: 29414 - DNA, 16 bp, Artificial
  oligonucleotide probe
gcgaagcggcgaggtc

SEQ ID NO: 29415 - DNA, 16 bp, Artificial
  oligonucleotide probe
gcgaagcggcgaggtc

SEQ ID NO: 29416 - DNA, 16 bp, Artificial
  oligonucleotide probe
gcctcggagacggcag

SEQ ID NO: 29417 - DNA, 16 bp, Artificial
  oligonucleotide probe
gcctcggagacggcag

SEQ ID NO: 29418 - DNA, 16 bp, Artificial
  oligonucleotide probe
acgccaggcgaggtgg

SEQ ID NO: 29419 - DNA, 16 bp, Artificial
  oligonucleotide probe
acgccaggcgaggtgg

SEQ ID NO: 29420 - DNA, 16 bp, Artificial
  oligonucleotide probe
gggtacgcgacgcgag

SEQ ID NO: 29421 - DNA, 16 bp, Artificial
  oligonucleotide probe
gtccgggtcaggcagg

SEQ ID NO: 29422 - DNA, 16 bp, Artificial
  oligonucleotide probe
cggatggcccaagggt

SEQ ID NO: 29423 - DNA, 16 bp, Artificial
  oligonucleotide probe
cggagcgagtggggaa

SEQ ID NO: 29424 - DNA, 16 bp, Artificial
  oligonucleotide probe
cgagcaccgagccgga

SEQ ID NO: 29425 - DNA, 16 bp, Artificial
  oligonucleotide probe
agcgcaccgacgacgc

SEQ ID NO: 29426 - DNA, 16 bp, Artificial
  oligonucleotide probe
caccagcgagacgcga

SEQ ID NO: 29427 - DNA, 16 bp, Artificial
  oligonucleotide probe
gtggccaatcacgcga

SEQ ID NO: 29428 - DNA, 16 bp, Artificial
  oligonucleotide probe
gtgggggtgcagggaa

SEQ ID NO: 29429 - DNA, 16 bp, Artificial
  oligonucleotide probe
gacggagcacgccgga

SEQ ID NO: 29430 - DNA, 16 bp, Artificial
  oligonucleotide probe
ggtcgcaggcgagggt

SEQ ID NO: 29431 - DNA, 16 bp, Artificial
  oligonucleotide probe
cagggcagggtcgggt

SEQ ID NO: 29432 - DNA, 16 bp, Artificial
  oligonucleotide probe
cggagagcgcgagcct

SEQ ID NO: 29433 - DNA, 16 bp, Artificial
  oligonucleotide probe
cggagcctgagcgtgg

SEQ ID NO: 29434 - DNA, 16 bp, Artificial
  oligonucleotide probe
cgagcggaggtcccaa

SEQ ID NO: 29435 - DNA, 16 bp, Artificial
  oligonucleotide probe
gtggcgagcctcgggt

SEQ ID NO: 29436 - DNA, 16 bp, Artificial
  oligonucleotide probe
cgagcaggcgaggcag

SEQ ID NO: 29437 - DNA, 16 bp, Artificial
  oligonucleotide probe
caggcctccctcgcga

SEQ ID NO: 29438 - DNA, 16 bp, Artificial
  oligonucleotide probe
gcctcaggacgcacgc

SEQ ID NO: 29439 - DNA, 16 bp, Artificial
  oligonucleotide probe
tggcgcctgtccgtgg

SEQ ID NO: 29440 - DNA, 16 bp, Artificial
  oligonucleotide probe
agcggacggcaggagc

SEQ ID NO: 29441 - DNA, 16 bp, Artificial
  oligonucleotide probe
acgccaccgcctgacg

SEQ ID NO: 29442 - DNA, 16 bp, Artificial
  oligonucleotide probe
cgaggacgccaaacgc

SEQ ID NO: 29443 - DNA, 16 bp, Artificial
  oligonucleotide probe
gcgacacccggaacgc

SEQ ID NO: 29444 - DNA, 16 bp, Artificial
  oligonucleotide probe
gcgacacccggaacgc

SEQ ID NO: 29445 - DNA, 16 bp, Artificial
  oligonucleotide probe
gcgacacccggaacgc

SEQ ID NO: 29446 - DNA, 16 bp, Artificial
  oligonucleotide probe
gcgacacccggaacgc

SEQ ID NO: 29447 - DNA, 16 bp, Artificial
  oligonucleotide probe
gcgacacccggaacgc

SEQ ID NO: 29448 - DNA, 16 bp, Artificial
  oligonucleotide probe
gcgacacccggaacgc

SEQ ID NO: 29449 - DNA, 16 bp, Artificial
  oligonucleotide probe
gcgacacccggaacgc

SEQ ID NO: 29450 - DNA, 16 bp, Artificial
  oligonucleotide probe
gcgacacccggaacgc

SEQ ID NO: 29451 - DNA, 16 bp, Artificial
  oligonucleotide probe
tcaccggagccttggc

SEQ ID NO: 29452 - DNA, 16 bp, Artificial
  oligonucleotide probe
tcaccggagccttggc

SEQ ID NO: 29453 - DNA, 16 bp, Artificial
  oligonucleotide probe
tcaccggagccttggc

SEQ ID NO: 29454 - DNA, 16 bp, Artificial
  oligonucleotide probe
tcaccggagccttggc

SEQ ID NO: 29455 - DNA, 16 bp, Artificial
  oligonucleotide probe
acgctgctgcgaacca

SEQ ID NO: 29456 - DNA, 16 bp, Artificial
  oligonucleotide probe
acgctgctgcgaacca

SEQ ID NO: 29457 - DNA, 16 bp, Artificial
  oligonucleotide probe
gagccgagtggcgtcc

SEQ ID NO: 29458 - DNA, 16 bp, Artificial
  oligonucleotide probe
gagccgagtggcgtcc

SEQ ID NO: 29459 - DNA, 16 bp, Artificial
  oligonucleotide probe
gcgacacccggaacgc

SEQ ID NO: 29460 - DNA, 16 bp, Artificial
  oligonucleotide probe
gcgacacccggaacgc

SEQ ID NO: 29461 - DNA, 16 bp, Artificial
  oligonucleotide probe
gcgacacccggaacgc

SEQ ID NO: 29462 - DNA, 16 bp, Artificial
  oligonucleotide probe
gcgacacccggaacgc

SEQ ID NO: 29463 - DNA, 16 bp, Artificial
  oligonucleotide probe
gacgagcgcaccgcag

SEQ ID NO: 29464 - DNA, 16 bp, Artificial
  oligonucleotide probe
gacgagcgcaccgcag

SEQ ID NO: 29465 - DNA, 16 bp, Artificial
  oligonucleotide probe
cggagacgcagggggt

SEQ ID NO: 29466 - DNA, 16 bp, Artificial
  oligonucleotide probe
cggagacgcagggggt

SEQ ID NO: 29467 - DNA, 16 bp, Artificial
  oligonucleotide probe
gtccccaaagcggcag

SEQ ID NO: 29468 - DNA, 16 bp, Artificial
  oligonucleotide probe
gtccccaaagcggcag

SEQ ID NO: 29469 - DNA, 16 bp, Artificial
  oligonucleotide probe
gtgggcctcctcccaa

SEQ ID NO: 29470 - DNA, 16 bp, Artificial
  oligonucleotide probe
gtgggcctcctcccaa

SEQ ID NO: 29471 - DNA, 16 bp, Artificial
  oligonucleotide probe
cggagacgcagggggt

SEQ ID NO: 29472 - DNA, 16 bp, Artificial
  oligonucleotide probe
cggagacgcagggggt

SEQ ID NO: 29473 - DNA, 16 bp, Artificial
  oligonucleotide probe
agcgcctcgacgggaa

SEQ ID NO: 29474 - DNA, 16 bp, Artificial
  oligonucleotide probe
agcgcctcgacgggaa

SEQ ID NO: 29475 - DNA, 16 bp, Artificial
  oligonucleotide probe
cggagacgcagggggt

SEQ ID NO: 29476 - DNA, 16 bp, Artificial
  oligonucleotide probe
cggagacgcagggggt

SEQ ID NO: 29477 - DNA, 16 bp, Artificial
  oligonucleotide probe
gagccgagtggcgtcc

SEQ ID NO: 29478 - DNA, 16 bp, Artificial
  oligonucleotide probe
gagccgagtggcgtcc

SEQ ID NO: 29479 - DNA, 16 bp, Artificial
  oligonucleotide probe
cggagacgcagggggt

SEQ ID NO: 29480 - DNA, 16 bp, Artificial
  oligonucleotide probe
cggagacgcagggggt

SEQ ID NO: 29481 - DNA, 16 bp, Artificial
  oligonucleotide probe
tcaccggagccttggc

SEQ ID NO: 29482 - DNA, 16 bp, Artificial
  oligonucleotide probe
tcaccggagccttggc

SEQ ID NO: 29483 - DNA, 16 bp, Artificial
  oligonucleotide probe
gcgaacgccctccagg

SEQ ID NO: 29484 - DNA, 16 bp, Artificial
  oligonucleotide probe
gcgaacgccctccagg

SEQ ID NO: 29485 - DNA, 16 bp, Artificial
  oligonucleotide probe
ggtcgagctggcgcag

SEQ ID NO: 29486 - DNA, 16 bp, Artificial
  oligonucleotide probe
ggtcgagctggcgcag

SEQ ID NO: 29487 - DNA, 16 bp, Artificial
  oligonucleotide probe
ggtcgagctggcgcag

SEQ ID NO: 29488 - DNA, 16 bp, Artificial
  oligonucleotide probe
ggtcgagctggcgcag

SEQ ID NO: 29489 - DNA, 16 bp, Artificial
  oligonucleotide probe
gcagcgagcgagggaa

SEQ ID NO: 29490 - DNA, 16 bp, Artificial
  oligonucleotide probe
gcagcgagcgagggaa

SEQ ID NO: 29491 - DNA, 16 bp, Artificial
  oligonucleotide probe
gcgacacccggaacgc

SEQ ID NO: 29492 - DNA, 16 bp, Artificial
  oligonucleotide probe
gcgacacccggaacgc

SEQ ID NO: 29493 - DNA, 16 bp, Artificial
  oligonucleotide probe
tcaccggagccttggc

SEQ ID NO: 29494 - DNA, 16 bp, Artificial
  oligonucleotide probe
tcaccggagccttggc

SEQ ID NO: 29495 - DNA, 16 bp, Artificial
  oligonucleotide probe
agcgcctcgacgggaa

SEQ ID NO: 29496 - DNA, 16 bp, Artificial
  oligonucleotide probe
agcgcctcgacgggaa

SEQ ID NO: 29497 - DNA, 16 bp, Artificial
  oligonucleotide probe
agcgcctcgacgggaa

SEQ ID NO: 29498 - DNA, 16 bp, Artificial
  oligonucleotide probe
agcgcctcgacgggaa

SEQ ID NO: 29499 - DNA, 16 bp, Artificial
  oligonucleotide probe
agcgcctcgacgggaa

SEQ ID NO: 29500 - DNA, 16 bp, Artificial
  oligonucleotide probe
agcgcctcgacgggaa

SEQ ID NO: 29501 - DNA, 16 bp, Artificial
  oligonucleotide probe
agcgcctcgacgggaa

SEQ ID NO: 29502 - DNA, 16 bp, Artificial
  oligonucleotide probe
agcgcctcgacgggaa

SEQ ID NO: 29503 - DNA, 16 bp, Artificial
  oligonucleotide probe
gcagcgagcgagggaa

SEQ ID NO: 29504 - DNA, 16 bp, Artificial
  oligonucleotide probe
gcagcgagcgagggaa

SEQ ID NO: 29505 - DNA, 16 bp, Artificial
  oligonucleotide probe
gtgggcctcctcccaa

SEQ ID NO: 29506 - DNA, 16 bp, Artificial
  oligonucleotide probe
gtgggcctcctcccaa

SEQ ID NO: 29507 - DNA, 16 bp, Artificial
  oligonucleotide probe
gagcgggtgtggagcg

SEQ ID NO: 29508 - DNA, 16 bp, Artificial
  oligonucleotide probe
gagcgggtgtggagcg

SEQ ID NO: 29509 - DNA, 16 bp, Artificial
  oligonucleotide probe
cggatgctgcgagcag

SEQ ID NO: 29510 - DNA, 16 bp, Artificial
  oligonucleotide probe
cggatgctgcgagcag

SEQ ID NO: 29511 - DNA, 16 bp, Artificial
  oligonucleotide probe
gtccccaaagcggcag

SEQ ID NO: 29512 - DNA, 16 bp, Artificial
  oligonucleotide probe
gtccccaaagcggcag

SEQ ID NO: 29513 - DNA, 16 bp, Artificial
  oligonucleotide probe
gacgagcgcaccgcag

SEQ ID NO: 29514 - DNA, 16 bp, Artificial
  oligonucleotide probe
gacgagcgcaccgcag

SEQ ID NO: 29515 - DNA, 16 bp, Artificial
  oligonucleotide probe
gagccgagtggcgtcc

SEQ ID NO: 29516 - DNA, 16 bp, Artificial
  oligonucleotide probe
gagccgagtggcgtcc

SEQ ID NO: 29517 - DNA, 16 bp, Artificial
  oligonucleotide probe
agcgcctcgacgggaa

SEQ ID NO: 29518 - DNA, 16 bp, Artificial
  oligonucleotide probe
agcgcctcgacgggaa

SEQ ID NO: 29519 - DNA, 16 bp, Artificial
  oligonucleotide probe
gagccgagtggcgtcc

SEQ ID NO: 29520 - DNA, 16 bp, Artificial
  oligonucleotide probe
gagccgagtggcgtcc

SEQ ID NO: 29521 - DNA, 16 bp, Artificial
  oligonucleotide probe
gtgggcctcctcccaa

SEQ ID NO: 29522 - DNA, 16 bp, Artificial
  oligonucleotide probe
gtgggcctcctcccaa

SEQ ID NO: 29523 - DNA, 16 bp, Artificial
  oligonucleotide probe
gcgacacccggaacgc

SEQ ID NO: 29524 - DNA, 16 bp, Artificial
  oligonucleotide probe
gcgacacccggaacgc

SEQ ID NO: 29525 - DNA, 16 bp, Artificial
  oligonucleotide probe
gtccgcaggtccgcct

SEQ ID NO: 29526 - DNA, 16 bp, Artificial
  oligonucleotide probe
gtccgcaggtccgcct

SEQ ID NO: 29527 - DNA, 16 bp, Artificial
  oligonucleotide probe
gcagcgagcgagggaa

SEQ ID NO: 29528 - DNA, 16 bp, Artificial
  oligonucleotide probe
gcagcgagcgagggaa

SEQ ID NO: 29529 - DNA, 16 bp, Artificial
  oligonucleotide probe
gagccgagtggcgtcc

SEQ ID NO: 29530 - DNA, 16 bp, Artificial
  oligonucleotide probe
gagccgagtggcgtcc

SEQ ID NO: 29531 - DNA, 16 bp, Artificial
  oligonucleotide probe
agcgcctcgacgggaa

SEQ ID NO: 29532 - DNA, 16 bp, Artificial
  oligonucleotide probe
agcgcctcgacgggaa

SEQ ID NO: 29533 - DNA, 16 bp, Artificial
  oligonucleotide probe
gtccccaaagcggcag

SEQ ID NO: 29534 - DNA, 16 bp, Artificial
  oligonucleotide probe
gtccccaaagcggcag

SEQ ID NO: 29535 - DNA, 16 bp, Artificial
  oligonucleotide probe
gcagcgagcgagggaa

SEQ ID NO: 29536 - DNA, 16 bp, Artificial
  oligonucleotide probe
gcagcgagcgagggaa

SEQ ID NO: 29537 - DNA, 16 bp, Artificial
  oligonucleotide probe
tcaccggagccttggc

SEQ ID NO: 29538 - DNA, 16 bp, Artificial
  oligonucleotide probe
tcaccggagccttggc

SEQ ID NO: 29539 - DNA, 16 bp, Artificial
  oligonucleotide probe
tcaccggagccttggc

SEQ ID NO: 29540 - DNA, 16 bp, Artificial
  oligonucleotide probe
tcaccggagccttggc

SEQ ID NO: 29541 - DNA, 16 bp, Artificial
  oligonucleotide probe
gcagcgagcgagggaa

SEQ ID NO: 29542 - DNA, 16 bp, Artificial
  oligonucleotide probe
gcagcgagcgagggaa

SEQ ID NO: 29543 - DNA, 16 bp, Artificial
  oligonucleotide probe
gcagcgagcgagggaa

SEQ ID NO: 29544 - DNA, 16 bp, Artificial
  oligonucleotide probe
gcagcgagcgagggaa

SEQ ID NO: 29545 - DNA, 16 bp, Artificial
  oligonucleotide probe
ggtcgagctggcgcag

SEQ ID NO: 29546 - DNA, 16 bp, Artificial
  oligonucleotide probe
ggtcgagctggcgcag

SEQ ID NO: 29547 - DNA, 16 bp, Artificial
  oligonucleotide probe
ggtcgagctggcgcag

SEQ ID NO: 29548 - DNA, 16 bp, Artificial
  oligonucleotide probe
ggtcgagctggcgcag

SEQ ID NO: 29549 - DNA, 16 bp, Artificial
  oligonucleotide probe
gagccgagtggcgtcc

SEQ ID NO: 29550 - DNA, 16 bp, Artificial
  oligonucleotide probe
gagccgagtggcgtcc

SEQ ID NO: 29551 - DNA, 16 bp, Artificial
  oligonucleotide probe
gcgacacccggaacgc

SEQ ID NO: 29552 - DNA, 16 bp, Artificial
  oligonucleotide probe
gcgacacccggaacgc

SEQ ID NO: 29553 - DNA, 16 bp, Artificial
  oligonucleotide probe
gcagcgagcgagggaa

SEQ ID NO: 29554 - DNA, 16 bp, Artificial
  oligonucleotide probe
gcagcgagcgagggaa

SEQ ID NO: 29555 - DNA, 16 bp, Artificial
  oligonucleotide probe
acgctgctgcgaacca

SEQ ID NO: 29556 - DNA, 16 bp, Artificial
  oligonucleotide probe
acgctgctgcgaacca

SEQ ID NO: 29557 - DNA, 16 bp, Artificial
  oligonucleotide probe
gcagcgagcgagggaa

SEQ ID NO: 29558 - DNA, 16 bp, Artificial
  oligonucleotide probe
gcagcgagcgagggaa

SEQ ID NO: 29559 - DNA, 16 bp, Artificial
  oligonucleotide probe
gtccccaaagcggcag

SEQ ID NO: 29560 - DNA, 16 bp, Artificial
  oligonucleotide probe
gtccccaaagcggcag

SEQ ID NO: 29561 - DNA, 16 bp, Artificial
  oligonucleotide probe
agcgcctcgacgggaa

SEQ ID NO: 29562 - DNA, 16 bp, Artificial
  oligonucleotide probe
agcgcctcgacgggaa

SEQ ID NO: 29563 - DNA, 16 bp, Artificial
  oligonucleotide probe
gtccgcaggtccgcct

SEQ ID NO: 29564 - DNA, 16 bp, Artificial
  oligonucleotide probe
gtccgcaggtccgcct

SEQ ID NO: 29565 - DNA, 16 bp, Artificial
  oligonucleotide probe
gagcgggtgtggagcg

SEQ ID NO: 29566 - DNA, 16 bp, Artificial
  oligonucleotide probe
gagcgggtgtggagcg

SEQ ID NO: 29567 - DNA, 16 bp, Artificial
  oligonucleotide probe
gcgaacgccctccagg

SEQ ID NO: 29568 - DNA, 16 bp, Artificial
  oligonucleotide probe
gcgaacgccctccagg

SEQ ID NO: 29569 - DNA, 16 bp, Artificial
  oligonucleotide probe
agcgcctcgacgggaa

SEQ ID NO: 29570 - DNA, 16 bp, Artificial
  oligonucleotide probe
agcgcctcgacgggaa

SEQ ID NO: 29571 - DNA, 16 bp, Artificial
  oligonucleotide probe
gacgagcgcaccgcag

SEQ ID NO: 29572 - DNA, 16 bp, Artificial
  oligonucleotide probe
gacgagcgcaccgcag

SEQ ID NO: 29573 - DNA, 16 bp, Artificial
  oligonucleotide probe
agcgcctcgacgggaa

SEQ ID NO: 29574 - DNA, 16 bp, Artificial
  oligonucleotide probe
agcgcctcgacgggaa

SEQ ID NO: 29575 - DNA, 16 bp, Artificial
  oligonucleotide probe
agcgcaggagacgcct

SEQ ID NO: 29576 - DNA, 16 bp, Artificial
  oligonucleotide probe
agcgcaggagacgcct

SEQ ID NO: 29577 - DNA, 16 bp, Artificial
  oligonucleotide probe
gcgacacccggaacgc

SEQ ID NO: 29578 - DNA, 16 bp, Artificial
  oligonucleotide probe
gcgacacccggaacgc

SEQ ID NO: 29579 - DNA, 16 bp, Artificial
  oligonucleotide probe
gcgacacccggaacgc

SEQ ID NO: 29580 - DNA, 16 bp, Artificial
  oligonucleotide probe
gcgacacccggaacgc

SEQ ID NO: 29581 - DNA, 16 bp, Artificial
  oligonucleotide probe
gtgggcctcctcccaa

SEQ ID NO: 29582 - DNA, 16 bp, Artificial
  oligonucleotide probe
gtgggcctcctcccaa

SEQ ID NO: 29583 - DNA, 16 bp, Artificial
  oligonucleotide probe
cggagacgcagggggt

SEQ ID NO: 29584 - DNA, 16 bp, Artificial
  oligonucleotide probe
cggagacgcagggggt

SEQ ID NO: 29585 - DNA, 16 bp, Artificial
  oligonucleotide probe
gcgacacccggaacgc

SEQ ID NO: 29586 - DNA, 16 bp, Artificial
  oligonucleotide probe
gcgacacccggaacgc

SEQ ID NO: 29587 - DNA, 16 bp, Artificial
  oligonucleotide probe
agcgcctcgacgggaa

SEQ ID NO: 29588 - DNA, 16 bp, Artificial
  oligonucleotide probe
agcgcctcgacgggaa

SEQ ID NO: 29589 - DNA, 16 bp, Artificial
  oligonucleotide probe
gagccgagtggcgtcc

SEQ ID NO: 29590 - DNA, 16 bp, Artificial
  oligonucleotide probe
gagccgagtggcgtcc

SEQ ID NO: 29591 - DNA, 16 bp, Artificial
  oligonucleotide probe
gcgaacgccctccagg

SEQ ID NO: 29592 - DNA, 16 bp, Artificial
  oligonucleotide probe
gcgaacgccctccagg

SEQ ID NO: 29593 - DNA, 16 bp, Artificial
  oligonucleotide probe
gcagcgagcgagggaa

SEQ ID NO: 29594 - DNA, 16 bp, Artificial
  oligonucleotide probe
gcagcgagcgagggaa

SEQ ID NO: 29595 - DNA, 16 bp, Artificial
  oligonucleotide probe
ggtcgagctggcgcag

SEQ ID NO: 29596 - DNA, 16 bp, Artificial
  oligonucleotide probe
ggtcgagctggcgcag

SEQ ID NO: 29597 - DNA, 16 bp, Artificial
  oligonucleotide probe
gcagcgagcgagggaa

SEQ ID NO: 29598 - DNA, 16 bp, Artificial
  oligonucleotide probe
gcagcgagcgagggaa

SEQ ID NO: 29599 - DNA, 16 bp, Artificial
  oligonucleotide probe
gtccccaaagcggcag

SEQ ID NO: 29600 - DNA, 16 bp, Artificial
  oligonucleotide probe
gtccccaaagcggcag

SEQ ID NO: 29601 - DNA, 16 bp, Artificial
  oligonucleotide probe
gagccgagtggcgtcc

SEQ ID NO: 29602 - DNA, 16 bp, Artificial
  oligonucleotide probe
gagccgagtggcgtcc

SEQ ID NO: 29603 - DNA, 16 bp, Artificial
  oligonucleotide probe
cggatgctgcgagcag

SEQ ID NO: 29604 - DNA, 16 bp, Artificial
  oligonucleotide probe
cggatgctgcgagcag

SEQ ID NO: 29605 - DNA, 16 bp, Artificial
  oligonucleotide probe
tcaccggagccttggc

SEQ ID NO: 29606 - DNA, 16 bp, Artificial
  oligonucleotide probe
tcaccggagccttggc

SEQ ID NO: 29607 - DNA, 16 bp, Artificial
  oligonucleotide probe
agcgcctcgacgggaa

SEQ ID NO: 29608 - DNA, 16 bp, Artificial
  oligonucleotide probe
agcgcctcgacgggaa

SEQ ID NO: 29609 - DNA, 16 bp, Artificial
  oligonucleotide probe
ggtcgagctggcgcag

SEQ ID NO: 29610 - DNA, 16 bp, Artificial
  oligonucleotide probe
ggtcgagctggcgcag

SEQ ID NO: 29611 - DNA, 16 bp, Artificial
  oligonucleotide probe
gagccgagtggcgtcc

SEQ ID NO: 29612 - DNA, 16 bp, Artificial
  oligonucleotide probe
gagccgagtggcgtcc

SEQ ID NO: 29613 - DNA, 16 bp, Artificial
  oligonucleotide probe
gcgaacgccctccagg

SEQ ID NO: 29614 - DNA, 16 bp, Artificial
  oligonucleotide probe
gcgaacgccctccagg

SEQ ID NO: 29615 - DNA, 16 bp, Artificial
  oligonucleotide probe
agcgcaggagacgcct

SEQ ID NO: 29616 - DNA, 16 bp, Artificial
  oligonucleotide probe
agcgcaggagacgcct

SEQ ID NO: 29617 - DNA, 16 bp, Artificial
  oligonucleotide probe
gtccgcaggtccgcct

SEQ ID NO: 29618 - DNA, 16 bp, Artificial
  oligonucleotide probe
gtccgcaggtccgcct

SEQ ID NO: 29619 - DNA, 16 bp, Artificial
  oligonucleotide probe
gcagcgagcgagggaa

SEQ ID NO: 29620 - DNA, 16 bp, Artificial
  oligonucleotide probe
gcagcgagcgagggaa

SEQ ID NO: 29621 - DNA, 16 bp, Artificial
  oligonucleotide probe
gcgaacgccctccagg

SEQ ID NO: 29622 - DNA, 16 bp, Artificial
  oligonucleotide probe
gcgaacgccctccagg

SEQ ID NO: 29623 - DNA, 16 bp, Artificial
  oligonucleotide probe
agcgcctcgacgggaa

SEQ ID NO: 29624 - DNA, 16 bp, Artificial
  oligonucleotide probe
agcgcctcgacgggaa

SEQ ID NO: 29625 - DNA, 16 bp, Artificial
  oligonucleotide probe
cggatgctgcgagcag

SEQ ID NO: 29626 - DNA, 16 bp, Artificial
  oligonucleotide probe
cggatgctgcgagcag

SEQ ID NO: 29627 - DNA, 16 bp, Artificial
  oligonucleotide probe
gtccccaaagcggcag

SEQ ID NO: 29628 - DNA, 16 bp, Artificial
  oligonucleotide probe
gtccccaaagcggcag

SEQ ID NO: 29629 - DNA, 16 bp, Artificial
  oligonucleotide probe
gagccgagtggcgtcc

SEQ ID NO: 29630 - DNA, 16 bp, Artificial
  oligonucleotide probe
gagccgagtggcgtcc

SEQ ID NO: 29631 - DNA, 16 bp, Artificial
  oligonucleotide probe
gcgacacccggaacgc

SEQ ID NO: 29632 - DNA, 16 bp, Artificial
  oligonucleotide probe
gcgacacccggaacgc

SEQ ID NO: 29633 - DNA, 16 bp, Artificial
  oligonucleotide probe
gcgacacccggaacgc

SEQ ID NO: 29634 - DNA, 16 bp, Artificial
  oligonucleotide probe
gcgacacccggaacgc

SEQ ID NO: 29635 - DNA, 16 bp, Artificial
  oligonucleotide probe
gcgacacccggaacgc

SEQ ID NO: 29636 - DNA, 16 bp, Artificial
  oligonucleotide probe
gcgacacccggaacgc

SEQ ID NO: 29637 - DNA, 16 bp, Artificial
  oligonucleotide probe
gtgggcctcctcccaa

SEQ ID NO: 29638 - DNA, 16 bp, Artificial
  oligonucleotide probe
gtgggcctcctcccaa

SEQ ID NO: 29639 - DNA, 16 bp, Artificial
  oligonucleotide probe
agcgcctcgacgggaa

SEQ ID NO: 29640 - DNA, 16 bp, Artificial
  oligonucleotide probe
agcgcctcgacgggaa

SEQ ID NO: 29641 - DNA, 16 bp, Artificial
  oligonucleotide probe
gacgagcgcaccgcag

SEQ ID NO: 29642 - DNA, 16 bp, Artificial
  oligonucleotide probe
gacgagcgcaccgcag

SEQ ID NO: 29643 - DNA, 16 bp, Artificial
  oligonucleotide probe
gtccccaaagcggcag

SEQ ID NO: 29644 - DNA, 16 bp, Artificial
  oligonucleotide probe
gtccccaaagcggcag

SEQ ID NO: 29645 - DNA, 16 bp, Artificial
  oligonucleotide probe
gcgacacccggaacgc

SEQ ID NO: 29646 - DNA, 16 bp, Artificial
  oligonucleotide probe
gcgacacccggaacgc

SEQ ID NO: 29647 - DNA, 16 bp, Artificial
  oligonucleotide probe
gacgagcgcaccgcag

SEQ ID NO: 29648 - DNA, 16 bp, Artificial
  oligonucleotide probe
gacgagcgcaccgcag

SEQ ID NO: 29649 - DNA, 16 bp, Artificial
  oligonucleotide probe
acgctgctgcgaacca

SEQ ID NO: 29650 - DNA, 16 bp, Artificial
  oligonucleotide probe
acgctgctgcgaacca

SEQ ID NO: 29651 - DNA, 16 bp, Artificial
  oligonucleotide probe
gcgaacgccctccagg

SEQ ID NO: 29652 - DNA, 16 bp, Artificial
  oligonucleotide probe
gcgaacgccctccagg

SEQ ID NO: 29653 - DNA, 16 bp, Artificial
  oligonucleotide probe
gagccgagtggcgtcc

SEQ ID NO: 29654 - DNA, 16 bp, Artificial
  oligonucleotide probe
gagccgagtggcgtcc

SEQ ID NO: 29655 - DNA, 16 bp, Artificial
  oligonucleotide probe
agcgcaggagacgcct

SEQ ID NO: 29656 - DNA, 16 bp, Artificial
  oligonucleotide probe
agcgcaggagacgcct

SEQ ID NO: 29657 - DNA, 16 bp, Artificial
  oligonucleotide probe
gagccgagtggcgtcc

SEQ ID NO: 29658 - DNA, 16 bp, Artificial
  oligonucleotide probe
gagccgagtggcgtcc

SEQ ID NO: 29659 - DNA, 16 bp, Artificial
  oligonucleotide probe
acgctgctgcgaacca

SEQ ID NO: 29660 - DNA, 16 bp, Artificial
  oligonucleotide probe
acgctgctgcgaacca

SEQ ID NO: 29661 - DNA, 16 bp, Artificial
  oligonucleotide probe
gcgacacccggaacgc

SEQ ID NO: 29662 - DNA, 16 bp, Artificial
  oligonucleotide probe
gcgacacccggaacgc

SEQ ID NO: 29663 - DNA, 16 bp, Artificial
  oligonucleotide probe
agcgcctcgacgggaa

SEQ ID NO: 29664 - DNA, 16 bp, Artificial
  oligonucleotide probe
agcgcctcgacgggaa

SEQ ID NO: 29665 - DNA, 16 bp, Artificial
  oligonucleotide probe
tcaccggagccttggc

SEQ ID NO: 29666 - DNA, 16 bp, Artificial
  oligonucleotide probe
tcaccggagccttggc

SEQ ID NO: 29667 - DNA, 16 bp, Artificial
  oligonucleotide probe
agcgcaggagacgcct

SEQ ID NO: 29668 - DNA, 16 bp, Artificial
  oligonucleotide probe
agcgcaggagacgcct

SEQ ID NO: 29669 - DNA, 16 bp, Artificial
  oligonucleotide probe
gcagcgagcgagggaa

SEQ ID NO: 29670 - DNA, 16 bp, Artificial
  oligonucleotide probe
gcagcgagcgagggaa

SEQ ID NO: 29671 - DNA, 16 bp, Artificial
  oligonucleotide probe
cggagacgcagggggt

SEQ ID NO: 29672 - DNA, 16 bp, Artificial
  oligonucleotide probe
cggagacgcagggggt

SEQ ID NO: 29673 - DNA, 16 bp, Artificial
  oligonucleotide probe
ggtcgagctggcgcag

SEQ ID NO: 29674 - DNA, 16 bp, Artificial
  oligonucleotide probe
ggtcgagctggcgcag

SEQ ID NO: 29675 - DNA, 16 bp, Artificial
  oligonucleotide probe
gtccgcaggtccgcct

SEQ ID NO: 29676 - DNA, 16 bp, Artificial
  oligonucleotide probe
gtccgcaggtccgcct

SEQ ID NO: 29677 - DNA, 16 bp, Artificial
  oligonucleotide probe
gcagcgagcgagggaa

SEQ ID NO: 29678 - DNA, 16 bp, Artificial
  oligonucleotide probe
gcagcgagcgagggaa

SEQ ID NO: 29679 - DNA, 16 bp, Artificial
  oligonucleotide probe
cggagacgcagggggt

SEQ ID NO: 29680 - DNA, 16 bp, Artificial
  oligonucleotide probe
cggagacgcagggggt

SEQ ID NO: 29681 - DNA, 16 bp, Artificial
  oligonucleotide probe
agcgcaggagacgcct

SEQ ID NO: 29682 - DNA, 16 bp, Artificial
  oligonucleotide probe
agcgcaggagacgcct

SEQ ID NO: 29683 - DNA, 16 bp, Artificial
  oligonucleotide probe
gtgggcctcctcccaa

SEQ ID NO: 29684 - DNA, 16 bp, Artificial
  oligonucleotide probe
gtgggcctcctcccaa

SEQ ID NO: 29685 - DNA, 16 bp, Artificial
  oligonucleotide probe
gtccccaaagcggcag

SEQ ID NO: 29686 - DNA, 16 bp, Artificial
  oligonucleotide probe
gtccccaaagcggcag

SEQ ID NO: 29687 - DNA, 16 bp, Artificial
  oligonucleotide probe
gcgaacgccctccagg

SEQ ID NO: 29688 - DNA, 16 bp, Artificial
  oligonucleotide probe
gcgaacgccctccagg

SEQ ID NO: 29689 - DNA, 16 bp, Artificial
  oligonucleotide probe
gcgaacgccctccagg

SEQ ID NO: 29690 - DNA, 16 bp, Artificial
  oligonucleotide probe
gcgaacgccctccagg

SEQ ID NO: 29691 - DNA, 16 bp, Artificial
  oligonucleotide probe
gagccgagtggcgtcc

SEQ ID NO: 29692 - DNA, 16 bp, Artificial
  oligonucleotide probe
gagccgagtggcgtcc

SEQ ID NO: 29693 - DNA, 16 bp, Artificial
  oligonucleotide probe
acgctgctgcgaacca

SEQ ID NO: 29694 - DNA, 16 bp, Artificial
  oligonucleotide probe
acgctgctgcgaacca

SEQ ID NO: 29695 - DNA, 16 bp, Artificial
  oligonucleotide probe
gtccccaaagcggcag

SEQ ID NO: 29696 - DNA, 16 bp, Artificial
  oligonucleotide probe
gtccccaaagcggcag

SEQ ID NO: 29697 - DNA, 16 bp, Artificial
  oligonucleotide probe
gacgagcgcaccgcag

SEQ ID NO: 29698 - DNA, 16 bp, Artificial
  oligonucleotide probe
gacgagcgcaccgcag

SEQ ID NO: 29699 - DNA, 16 bp, Artificial
  oligonucleotide probe
gcagcgagcgagggaa

SEQ ID NO: 29700 - DNA, 16 bp, Artificial
  oligonucleotide probe
gcagcgagcgagggaa

SEQ ID NO: 29701 - DNA, 16 bp, Artificial
  oligonucleotide probe
acgctgctgcgaacca

SEQ ID NO: 29702 - DNA, 16 bp, Artificial
  oligonucleotide probe
acgctgctgcgaacca

SEQ ID NO: 29703 - DNA, 16 bp, Artificial
  oligonucleotide probe
agcgcaggagacgcct

SEQ ID NO: 29704 - DNA, 16 bp, Artificial
  oligonucleotide probe
agcgcaggagacgcct

SEQ ID NO: 29705 - DNA, 16 bp, Artificial
  oligonucleotide probe
acgctgctgcgaacca

SEQ ID NO: 29706 - DNA, 16 bp, Artificial
  oligonucleotide probe
acgctgctgcgaacca

SEQ ID NO: 29707 - DNA, 16 bp, Artificial
  oligonucleotide probe
gacgagcgcaccgcag

SEQ ID NO: 29708 - DNA, 16 bp, Artificial
  oligonucleotide probe
gacgagcgcaccgcag

SEQ ID NO: 29709 - DNA, 16 bp, Artificial
  oligonucleotide probe
gcagcgagcgagggaa

SEQ ID NO: 29710 - DNA, 16 bp, Artificial
  oligonucleotide probe
gcagcgagcgagggaa

SEQ ID NO: 29711 - DNA, 16 bp, Artificial
  oligonucleotide probe
agcgcaggagacgcct

SEQ ID NO: 29712 - DNA, 16 bp, Artificial
  oligonucleotide probe
agcgcaggagacgcct

SEQ ID NO: 29713 - DNA, 16 bp, Artificial
  oligonucleotide probe
gtgggcctcctcccaa

SEQ ID NO: 29714 - DNA, 16 bp, Artificial
  oligonucleotide probe
gtgggcctcctcccaa

SEQ ID NO: 29715 - DNA, 16 bp, Artificial
  oligonucleotide probe
ggtcgagctggcgcag

SEQ ID NO: 29716 - DNA, 16 bp, Artificial
  oligonucleotide probe
ggtcgagctggcgcag

SEQ ID NO: 29717 - DNA, 16 bp, Artificial
  oligonucleotide probe
gacgagcgcaccgcag

SEQ ID NO: 29718 - DNA, 16 bp, Artificial
  oligonucleotide probe
gacgagcgcaccgcag

SEQ ID NO: 29719 - DNA, 16 bp, Artificial
  oligonucleotide probe
agcgcaggagacgcct

SEQ ID NO: 29720 - DNA, 16 bp, Artificial
  oligonucleotide probe
agcgcaggagacgcct

SEQ ID NO: 29721 - DNA, 16 bp, Artificial
  oligonucleotide probe
gcgaacgccctccagg

SEQ ID NO: 29722 - DNA, 16 bp, Artificial
  oligonucleotide probe
gcgaacgccctccagg

SEQ ID NO: 29723 - DNA, 16 bp, Artificial
  oligonucleotide probe
gcagcgagcgagggaa

SEQ ID NO: 29724 - DNA, 16 bp, Artificial
  oligonucleotide probe
gcagcgagcgagggaa

SEQ ID NO: 29725 - DNA, 16 bp, Artificial
  oligonucleotide probe
acgctgctgcgaacca

SEQ ID NO: 29726 - DNA, 16 bp, Artificial
  oligonucleotide probe
acgctgctgcgaacca

SEQ ID NO: 29727 - DNA, 16 bp, Artificial
  oligonucleotide probe
cggatgctgcgagcag

SEQ ID NO: 29728 - DNA, 16 bp, Artificial
  oligonucleotide probe
cggatgctgcgagcag

SEQ ID NO: 29729 - DNA, 16 bp, Artificial
  oligonucleotide probe
gcagcgagcgagggaa

SEQ ID NO: 29730 - DNA, 16 bp, Artificial
  oligonucleotide probe
gcagcgagcgagggaa

SEQ ID NO: 29731 - DNA, 16 bp, Artificial
  oligonucleotide probe
gcagcgagcgagggaa

SEQ ID NO: 29732 - DNA, 16 bp, Artificial
  oligonucleotide probe
gcagcgagcgagggaa

SEQ ID NO: 29733 - DNA, 16 bp, Artificial
  oligonucleotide probe
gcagcgagcgagggaa

SEQ ID NO: 29734 - DNA, 16 bp, Artificial
  oligonucleotide probe
gcagcgagcgagggaa

SEQ ID NO: 29735 - DNA, 16 bp, Artificial
  oligonucleotide probe
gtccccaaagcggcag

SEQ ID NO: 29736 - DNA, 16 bp, Artificial
  oligonucleotide probe
gtccccaaagcggcag

SEQ ID NO: 29737 - DNA, 16 bp, Artificial
  oligonucleotide probe
agcgcaggagacgcct

SEQ ID NO: 29738 - DNA, 16 bp, Artificial
  oligonucleotide probe
agcgcaggagacgcct

SEQ ID NO: 29739 - DNA, 16 bp, Artificial
  oligonucleotide probe
agcgcaggagacgcct

SEQ ID NO: 29740 - DNA, 16 bp, Artificial
  oligonucleotide probe
agcgcaggagacgcct

SEQ ID NO: 29741 - DNA, 16 bp, Artificial
  oligonucleotide probe
gtccccaaagcggcag

SEQ ID NO: 29742 - DNA, 16 bp, Artificial
  oligonucleotide probe
gtccccaaagcggcag

SEQ ID NO: 29743 - DNA, 16 bp, Artificial
  oligonucleotide probe
gcgaacgccctccagg

SEQ ID NO: 29744 - DNA, 16 bp, Artificial
  oligonucleotide probe
gcgaacgccctccagg

SEQ ID NO: 29745 - DNA, 16 bp, Artificial
  oligonucleotide probe
gagcgggtgtggagcg

SEQ ID NO: 29746 - DNA, 16 bp, Artificial
  oligonucleotide probe
gagcgggtgtggagcg

SEQ ID NO: 29747 - DNA, 16 bp, Artificial
  oligonucleotide probe
gcgacacccggaacgc

SEQ ID NO: 29748 - DNA, 16 bp, Artificial
  oligonucleotide probe
gcgacacccggaacgc

SEQ ID NO: 29749 - DNA, 16 bp, Artificial
  oligonucleotide probe
gacgagcgcaccgcag

SEQ ID NO: 29750 - DNA, 16 bp, Artificial
  oligonucleotide probe
gacgagcgcaccgcag

SEQ ID NO: 29751 - DNA, 16 bp, Artificial
  oligonucleotide probe
gagccgagtggcgtcc

SEQ ID NO: 29752 - DNA, 16 bp, Artificial
  oligonucleotide probe
gagccgagtggcgtcc

SEQ ID NO: 29753 - DNA, 16 bp, Artificial
  oligonucleotide probe
gtccccaaagcggcag

SEQ ID NO: 29754 - DNA, 16 bp, Artificial
  oligonucleotide probe
gtccccaaagcggcag

SEQ ID NO: 29755 - DNA, 16 bp, Artificial
  oligonucleotide probe
gcgacacccggaacgc

SEQ ID NO: 29756 - DNA, 16 bp, Artificial
  oligonucleotide probe
gcgacacccggaacgc

SEQ ID NO: 29757 - DNA, 16 bp, Artificial
  oligonucleotide probe
gagccgagtggcgtcc

SEQ ID NO: 29758 - DNA, 16 bp, Artificial
  oligonucleotide probe
gagccgagtggcgtcc

SEQ ID NO: 29759 - DNA, 16 bp, Artificial
  oligonucleotide probe
cggatgctgcgagcag

SEQ ID NO: 29760 - DNA, 16 bp, Artificial
  oligonucleotide probe
cggatgctgcgagcag

SEQ ID NO: 29761 - DNA, 16 bp, Artificial
  oligonucleotide probe
agcgcctcgacgggaa

SEQ ID NO: 29762 - DNA, 16 bp, Artificial
  oligonucleotide probe
agcgcctcgacgggaa

SEQ ID NO: 29763 - DNA, 16 bp, Artificial
  oligonucleotide probe
gcgacacccggaacgc

SEQ ID NO: 29764 - DNA, 16 bp, Artificial
  oligonucleotide probe
gcgacacccggaacgc

SEQ ID NO: 29765 - DNA, 16 bp, Artificial
  oligonucleotide probe
gacgagcgcaccgcag

SEQ ID NO: 29766 - DNA, 16 bp, Artificial
  oligonucleotide probe
gacgagcgcaccgcag

SEQ ID NO: 29767 - DNA, 16 bp, Artificial
  oligonucleotide probe
acgctgctgcgaacca

SEQ ID NO: 29768 - DNA, 16 bp, Artificial
  oligonucleotide probe
acgctgctgcgaacca

SEQ ID NO: 29769 - DNA, 16 bp, Artificial
  oligonucleotide probe
gtccccaaagcggcag

SEQ ID NO: 29770 - DNA, 16 bp, Artificial
  oligonucleotide probe
gtccccaaagcggcag

SEQ ID NO: 29771 - DNA, 16 bp, Artificial
  oligonucleotide probe
gtgggcctcctcccaa

SEQ ID NO: 29772 - DNA, 16 bp, Artificial
  oligonucleotide probe
gtgggcctcctcccaa

SEQ ID NO: 29773 - DNA, 16 bp, Artificial
  oligonucleotide probe
gcgacacccggaacgc

SEQ ID NO: 29774 - DNA, 16 bp, Artificial
  oligonucleotide probe
gcgacacccggaacgc

SEQ ID NO: 29775 - DNA, 16 bp, Artificial
  oligonucleotide probe
gtccccaaagcggcag

SEQ ID NO: 29776 - DNA, 16 bp, Artificial
  oligonucleotide probe
gtccccaaagcggcag

SEQ ID NO: 29777 - DNA, 16 bp, Artificial
  oligonucleotide probe
gtgggcctcctcccaa

SEQ ID NO: 29778 - DNA, 16 bp, Artificial
  oligonucleotide probe
gtgggcctcctcccaa

SEQ ID NO: 29779 - DNA, 16 bp, Artificial
  oligonucleotide probe
agcgcctcgacgggaa

SEQ ID NO: 29780 - DNA, 16 bp, Artificial
  oligonucleotide probe
agcgcctcgacgggaa

SEQ ID NO: 29781 - DNA, 16 bp, Artificial
  oligonucleotide probe
agcgcctcgacgggaa

SEQ ID NO: 29782 - DNA, 16 bp, Artificial
  oligonucleotide probe
agcgcctcgacgggaa

SEQ ID NO: 29783 - DNA, 16 bp, Artificial
  oligonucleotide probe
acgctgctgcgaacca

SEQ ID NO: 29784 - DNA, 16 bp, Artificial
  oligonucleotide probe
acgctgctgcgaacca

SEQ ID NO: 29785 - DNA, 16 bp, Artificial
  oligonucleotide probe
gcgaacgccctccagg

SEQ ID NO: 29786 - DNA, 16 bp, Artificial
  oligonucleotide probe
gcgaacgccctccagg

SEQ ID NO: 29787 - DNA, 16 bp, Artificial
  oligonucleotide probe
cggatgctgcgagcag

SEQ ID NO: 29788 - DNA, 16 bp, Artificial
  oligonucleotide probe
cggatgctgcgagcag

SEQ ID NO: 29789 - DNA, 16 bp, Artificial
  oligonucleotide probe
gtccgcaggtccgcct

SEQ ID NO: 29790 - DNA, 16 bp, Artificial
  oligonucleotide probe
gtccgcaggtccgcct

SEQ ID NO: 29791 - DNA, 16 bp, Artificial
  oligonucleotide probe
agcgcaggagacgcct

SEQ ID NO: 29792 - DNA, 16 bp, Artificial
  oligonucleotide probe
agcgcaggagacgcct

SEQ ID NO: 29793 - DNA, 16 bp, Artificial
  oligonucleotide probe
cggatgctgcgagcag

SEQ ID NO: 29794 - DNA, 16 bp, Artificial
  oligonucleotide probe
cggatgctgcgagcag

SEQ ID NO: 29795 - DNA, 16 bp, Artificial
  oligonucleotide probe
gagccgagtggcgtcc

SEQ ID NO: 29796 - DNA, 16 bp, Artificial
  oligonucleotide probe
gagccgagtggcgtcc

SEQ ID NO: 29797 - DNA, 16 bp, Artificial
  oligonucleotide probe
gacgagcgcaccgcag

SEQ ID NO: 29798 - DNA, 16 bp, Artificial
  oligonucleotide probe
gacgagcgcaccgcag

SEQ ID NO: 29799 - DNA, 16 bp, Artificial
  oligonucleotide probe
gcgaacgccctccagg

SEQ ID NO: 29800 - DNA, 16 bp, Artificial
  oligonucleotide probe
gcgaacgccctccagg

SEQ ID NO: 29801 - DNA, 16 bp, Artificial
  oligonucleotide probe
gtccccaaagcggcag

SEQ ID NO: 29802 - DNA, 16 bp, Artificial
  oligonucleotide probe
gtccccaaagcggcag

SEQ ID NO: 29803 - DNA, 16 bp, Artificial
  oligonucleotide probe
cggatgctgcgagcag

SEQ ID NO: 29804 - DNA, 16 bp, Artificial
  oligonucleotide probe
cggatgctgcgagcag

SEQ ID NO: 29805 - DNA, 16 bp, Artificial
  oligonucleotide probe
gagccgagtggcgtcc

SEQ ID NO: 29806 - DNA, 16 bp, Artificial
  oligonucleotide probe
gagccgagtggcgtcc

SEQ ID NO: 29807 - DNA, 16 bp, Artificial
  oligonucleotide probe
ggtcgagctggcgcag

SEQ ID NO: 29808 - DNA, 16 bp, Artificial
  oligonucleotide probe
ggtcgagctggcgcag

SEQ ID NO: 29809 - DNA, 16 bp, Artificial
  oligonucleotide probe
gtccccaaagcggcag

SEQ ID NO: 29810 - DNA, 16 bp, Artificial
  oligonucleotide probe
gtccccaaagcggcag

SEQ ID NO: 29811 - DNA, 16 bp, Artificial
  oligonucleotide probe
gcagcgagcgagggaa

SEQ ID NO: 29812 - DNA, 16 bp, Artificial
  oligonucleotide probe
gcagcgagcgagggaa

SEQ ID NO: 29813 - DNA, 16 bp, Artificial
  oligonucleotide probe
gtccgcaggtccgcct

SEQ ID NO: 29814 - DNA, 16 bp, Artificial
  oligonucleotide probe
gtccgcaggtccgcct

SEQ ID NO: 29815 - DNA, 16 bp, Artificial
  oligonucleotide probe
gcagcgagcgagggaa

SEQ ID NO: 29816 - DNA, 16 bp, Artificial
  oligonucleotide probe
gcagcgagcgagggaa

SEQ ID NO: 29817 - DNA, 16 bp, Artificial
  oligonucleotide probe
agcgcctcgacgggaa

SEQ ID NO: 29818 - DNA, 16 bp, Artificial
  oligonucleotide probe
agcgcctcgacgggaa

SEQ ID NO: 29819 - DNA, 16 bp, Artificial
  oligonucleotide probe
ggtcgagctggcgcag

SEQ ID NO: 29820 - DNA, 16 bp, Artificial
  oligonucleotide probe
ggtcgagctggcgcag

SEQ ID NO: 29821 - DNA, 16 bp, Artificial
  oligonucleotide probe
gcgaacgccctccagg

SEQ ID NO: 29822 - DNA, 16 bp, Artificial
  oligonucleotide probe
gcgaacgccctccagg

SEQ ID NO: 29823 - DNA, 16 bp, Artificial
  oligonucleotide probe
tcaccggagccttggc

SEQ ID NO: 29824 - DNA, 16 bp, Artificial
  oligonucleotide probe
tcaccggagccttggc

SEQ ID NO: 29825 - DNA, 16 bp, Artificial
  oligonucleotide probe
agcgcctcgacgggaa

SEQ ID NO: 29826 - DNA, 16 bp, Artificial
  oligonucleotide probe
agcgcctcgacgggaa

SEQ ID NO: 29827 - DNA, 16 bp, Artificial
  oligonucleotide probe
gacgagcgcaccgcag

SEQ ID NO: 29828 - DNA, 16 bp, Artificial
  oligonucleotide probe
gacgagcgcaccgcag

SEQ ID NO: 29829 - DNA, 16 bp, Artificial
  oligonucleotide probe
gtgggcctcctcccaa

SEQ ID NO: 29830 - DNA, 16 bp, Artificial
  oligonucleotide probe
gtgggcctcctcccaa

SEQ ID NO: 29831 - DNA, 16 bp, Artificial
  oligonucleotide probe
gagccgagtggcgtcc

SEQ ID NO: 29832 - DNA, 16 bp, Artificial
  oligonucleotide probe
gagccgagtggcgtcc

SEQ ID NO: 29833 - DNA, 16 bp, Artificial
  oligonucleotide probe
ggtcgagctggcgcag

SEQ ID NO: 29834 - DNA, 16 bp, Artificial
  oligonucleotide probe
ggtcgagctggcgcag

SEQ ID NO: 29835 - DNA, 16 bp, Artificial
  oligonucleotide probe
agcgcaggagacgcct

SEQ ID NO: 29836 - DNA, 16 bp, Artificial
  oligonucleotide probe
agcgcaggagacgcct

SEQ ID NO: 29837 - DNA, 16 bp, Artificial
  oligonucleotide probe
cggagacgcagggggt

SEQ ID NO: 29838 - DNA, 16 bp, Artificial
  oligonucleotide probe
cggagacgcagggggt

SEQ ID NO: 29839 - DNA, 16 bp, Artificial
  oligonucleotide probe
gcagcgagcgagggaa

SEQ ID NO: 29840 - DNA, 16 bp, Artificial
  oligonucleotide probe
gcagcgagcgagggaa

SEQ ID NO: 29841 - DNA, 16 bp, Artificial
  oligonucleotide probe
gcgacacccggaacgc

SEQ ID NO: 29842 - DNA, 16 bp, Artificial
  oligonucleotide probe
gcgacacccggaacgc

SEQ ID NO: 29843 - DNA, 16 bp, Artificial
  oligonucleotide probe
agcgcctcgacgggaa

SEQ ID NO: 29844 - DNA, 16 bp, Artificial
  oligonucleotide probe
agcgcctcgacgggaa

SEQ ID NO: 29845 - DNA, 16 bp, Artificial
  oligonucleotide probe
gtgggcctcctcccaa

SEQ ID NO: 29846 - DNA, 16 bp, Artificial
  oligonucleotide probe
gtgggcctcctcccaa

SEQ ID NO: 29847 - DNA, 16 bp, Artificial
  oligonucleotide probe
gacgagcgcaccgcag

SEQ ID NO: 29848 - DNA, 16 bp, Artificial
  oligonucleotide probe
gacgagcgcaccgcag

SEQ ID NO: 29849 - DNA, 16 bp, Artificial
  oligonucleotide probe
gtccccaaagcggcag

SEQ ID NO: 29850 - DNA, 16 bp, Artificial
  oligonucleotide probe
gtccccaaagcggcag

SEQ ID NO: 29851 - DNA, 16 bp, Artificial
  oligonucleotide probe
gagcgggtgtggagcg

SEQ ID NO: 29852 - DNA, 16 bp, Artificial
  oligonucleotide probe
gagcgggtgtggagcg

SEQ ID NO: 29853 - DNA, 16 bp, Artificial
  oligonucleotide probe
gcgacacccggaacgc

SEQ ID NO: 29854 - DNA, 16 bp, Artificial
  oligonucleotide probe
gcgacacccggaacgc

SEQ ID NO: 29855 - DNA, 16 bp, Artificial
  oligonucleotide probe
gcagcgagcgagggaa

SEQ ID NO: 29856 - DNA, 16 bp, Artificial
  oligonucleotide probe
gcagcgagcgagggaa

SEQ ID NO: 29857 - DNA, 16 bp, Artificial
  oligonucleotide probe
gtgggcctcctcccaa

SEQ ID NO: 29858 - DNA, 16 bp, Artificial
  oligonucleotide probe
gtgggcctcctcccaa

SEQ ID NO: 29859 - DNA, 16 bp, Artificial
  oligonucleotide probe
gagcgggtgtggagcg

SEQ ID NO: 29860 - DNA, 16 bp, Artificial
  oligonucleotide probe
gagcgggtgtggagcg

SEQ ID NO: 29861 - DNA, 16 bp, Artificial
  oligonucleotide probe
cggatgctgcgagcag

SEQ ID NO: 29862 - DNA, 16 bp, Artificial
  oligonucleotide probe
cggatgctgcgagcag

SEQ ID NO: 29863 - DNA, 16 bp, Artificial
  oligonucleotide probe
gtgggcctcctcccaa

SEQ ID NO: 29864 - DNA, 16 bp, Artificial
  oligonucleotide probe
gtgggcctcctcccaa

SEQ ID NO: 29865 - DNA, 16 bp, Artificial
  oligonucleotide probe
gcagcgagcgagggaa

SEQ ID NO: 29866 - DNA, 16 bp, Artificial
  oligonucleotide probe
gcagcgagcgagggaa

SEQ ID NO: 29867 - DNA, 16 bp, Artificial
  oligonucleotide probe
agcgcaggagacgcct

SEQ ID NO: 29868 - DNA, 16 bp, Artificial
  oligonucleotide probe
agcgcaggagacgcct

SEQ ID NO: 29869 - DNA, 16 bp, Artificial
  oligonucleotide probe
gtgggcctcctcccaa

SEQ ID NO: 29870 - DNA, 16 bp, Artificial
  oligonucleotide probe
gtgggcctcctcccaa

SEQ ID NO: 29871 - DNA, 16 bp, Artificial
  oligonucleotide probe
gtccccaaagcggcag

SEQ ID NO: 29872 - DNA, 16 bp, Artificial
  oligonucleotide probe
gtccccaaagcggcag

SEQ ID NO: 29873 - DNA, 16 bp, Artificial
  oligonucleotide probe
gcgacacccggaacgc

SEQ ID NO: 29874 - DNA, 16 bp, Artificial
  oligonucleotide probe
gcgacacccggaacgc

SEQ ID NO: 29875 - DNA, 16 bp, Artificial
  oligonucleotide probe
gagccgagtggcgtcc

SEQ ID NO: 29876 - DNA, 16 bp, Artificial
  oligonucleotide probe
gagccgagtggcgtcc

SEQ ID NO: 29877 - DNA, 16 bp, Artificial
  oligonucleotide probe
tcaccggagccttggc

SEQ ID NO: 29878 - DNA, 16 bp, Artificial
  oligonucleotide probe
tcaccggagccttggc

SEQ ID NO: 29879 - DNA, 16 bp, Artificial
  oligonucleotide probe
gtccgcaggtccgcct

SEQ ID NO: 29880 - DNA, 16 bp, Artificial
  oligonucleotide probe
gtccgcaggtccgcct

SEQ ID NO: 29881 - DNA, 16 bp, Artificial
  oligonucleotide probe
gcgacacccggaacgc

SEQ ID NO: 29882 - DNA, 16 bp, Artificial
  oligonucleotide probe
gcgacacccggaacgc

SEQ ID NO: 29883 - DNA, 16 bp, Artificial
  oligonucleotide probe
ggtcgagctggcgcag

SEQ ID NO: 29884 - DNA, 16 bp, Artificial
  oligonucleotide probe
ggtcgagctggcgcag

SEQ ID NO: 29885 - DNA, 16 bp, Artificial
  oligonucleotide probe
gacgagcgcaccgcag

SEQ ID NO: 29886 - DNA, 16 bp, Artificial
  oligonucleotide probe
gacgagcgcaccgcag

SEQ ID NO: 29887 - DNA, 16 bp, Artificial
  oligonucleotide probe
gtccccaaagcggcag

SEQ ID NO: 29888 - DNA, 16 bp, Artificial
  oligonucleotide probe
gtccccaaagcggcag

SEQ ID NO: 29889 - DNA, 16 bp, Artificial
  oligonucleotide probe
gcgacacccggaacgc

SEQ ID NO: 29890 - DNA, 16 bp, Artificial
  oligonucleotide probe
gcgacacccggaacgc

SEQ ID NO: 29891 - DNA, 16 bp, Artificial
  oligonucleotide probe
tcaccggagccttggc

SEQ ID NO: 29892 - DNA, 16 bp, Artificial
  oligonucleotide probe
tcaccggagccttggc

SEQ ID NO: 29893 - DNA, 16 bp, Artificial
  oligonucleotide probe
ggtcgagctggcgcag

SEQ ID NO: 29894 - DNA, 16 bp, Artificial
  oligonucleotide probe
ggtcgagctggcgcag

SEQ ID NO: 29895 - DNA, 16 bp, Artificial
  oligonucleotide probe
cggagacgcagggggt

SEQ ID NO: 29896 - DNA, 16 bp, Artificial
  oligonucleotide probe
cggagacgcagggggt

SEQ ID NO: 29897 - DNA, 16 bp, Artificial
  oligonucleotide probe
cggagacgcagggggt

SEQ ID NO: 29898 - DNA, 16 bp, Artificial
  oligonucleotide probe
cggagacgcagggggt

SEQ ID NO: 29899 - DNA, 16 bp, Artificial
  oligonucleotide probe
acgctgctgcgaacca

SEQ ID NO: 29900 - DNA, 16 bp, Artificial
  oligonucleotide probe
acgctgctgcgaacca

SEQ ID NO: 29901 - DNA, 16 bp, Artificial
  oligonucleotide probe
acgctgctgcgaacca

SEQ ID NO: 29902 - DNA, 16 bp, Artificial
  oligonucleotide probe
acgctgctgcgaacca

SEQ ID NO: 29903 - DNA, 16 bp, Artificial
  oligonucleotide probe
gcagcgagcgagggaa

SEQ ID NO: 29904 - DNA, 16 bp, Artificial
  oligonucleotide probe
gcagcgagcgagggaa

SEQ ID NO: 29905 - DNA, 16 bp, Artificial
  oligonucleotide probe
ggtcgagctggcgcag

SEQ ID NO: 29906 - DNA, 16 bp, Artificial
  oligonucleotide probe
ggtcgagctggcgcag

SEQ ID NO: 29907 - DNA, 16 bp, Artificial
  oligonucleotide probe
agcgcctcgacgggaa

SEQ ID NO: 29908 - DNA, 16 bp, Artificial
  oligonucleotide probe
agcgcctcgacgggaa

SEQ ID NO: 29909 - DNA, 16 bp, Artificial
  oligonucleotide probe
ggtcgagctggcgcag

SEQ ID NO: 29910 - DNA, 16 bp, Artificial
  oligonucleotide probe
ggtcgagctggcgcag

SEQ ID NO: 29911 - DNA, 16 bp, Artificial
  oligonucleotide probe
tcaccggagccttggc

SEQ ID NO: 29912 - DNA, 16 bp, Artificial
  oligonucleotide probe
tcaccggagccttggc

SEQ ID NO: 29913 - DNA, 16 bp, Artificial
  oligonucleotide probe
gcagcgagcgagggaa

SEQ ID NO: 29914 - DNA, 16 bp, Artificial
  oligonucleotide probe
gcagcgagcgagggaa

SEQ ID NO: 29915 - DNA, 16 bp, Artificial
  oligonucleotide probe
tcaccggagccttggc

SEQ ID NO: 29916 - DNA, 16 bp, Artificial
  oligonucleotide probe
tcaccggagccttggc

SEQ ID NO: 29917 - DNA, 16 bp, Artificial
  oligonucleotide probe
gtccgcaggtccgcct

SEQ ID NO: 29918 - DNA, 16 bp, Artificial
  oligonucleotide probe
gtccgcaggtccgcct

SEQ ID NO: 29919 - DNA, 16 bp, Artificial
  oligonucleotide probe
agcgcctcgacgggaa

SEQ ID NO: 29920 - DNA, 16 bp, Artificial
  oligonucleotide probe
agcgcctcgacgggaa

SEQ ID NO: 29921 - DNA, 16 bp, Artificial
  oligonucleotide probe
gagccgagtggcgtcc

SEQ ID NO: 29922 - DNA, 16 bp, Artificial
  oligonucleotide probe
gagccgagtggcgtcc

SEQ ID NO: 29923 - DNA, 16 bp, Artificial
  oligonucleotide probe
ggtcgagctggcgcag

SEQ ID NO: 29924 - DNA, 16 bp, Artificial
  oligonucleotide probe
ggtcgagctggcgcag

SEQ ID NO: 29925 - DNA, 16 bp, Artificial
  oligonucleotide probe
acgctgctgcgaacca

SEQ ID NO: 29926 - DNA, 16 bp, Artificial
  oligonucleotide probe
acgctgctgcgaacca

SEQ ID NO: 29927 - DNA, 16 bp, Artificial
  oligonucleotide probe
gcgacacccggaacgc

SEQ ID NO: 29928 - DNA, 16 bp, Artificial
  oligonucleotide probe
gcgacacccggaacgc

SEQ ID NO: 29929 - DNA, 16 bp, Artificial
  oligonucleotide probe
gtgggcctcctcccaa

SEQ ID NO: 29930 - DNA, 16 bp, Artificial
  oligonucleotide probe
gtgggcctcctcccaa

SEQ ID NO: 29931 - DNA, 16 bp, Artificial
  oligonucleotide probe
gagccgagtggcgtcc

SEQ ID NO: 29932 - DNA, 16 bp, Artificial
  oligonucleotide probe
gagccgagtggcgtcc

SEQ ID NO: 29933 - DNA, 16 bp, Artificial
  oligonucleotide probe
gcagcgagcgagggaa

SEQ ID NO: 29934 - DNA, 16 bp, Artificial
  oligonucleotide probe
gcagcgagcgagggaa

SEQ ID NO: 29935 - DNA, 16 bp, Artificial
  oligonucleotide probe
gcagcgagcgagggaa

SEQ ID NO: 29936 - DNA, 16 bp, Artificial
  oligonucleotide probe
gcagcgagcgagggaa

SEQ ID NO: 29937 - DNA, 16 bp, Artificial
  oligonucleotide probe
agcgcctcgacgggaa

SEQ ID NO: 29938 - DNA, 16 bp, Artificial
  oligonucleotide probe
agcgcctcgacgggaa

SEQ ID NO: 29939 - DNA, 16 bp, Artificial
  oligonucleotide probe
agcgcctcgacgggaa

SEQ ID NO: 29940 - DNA, 16 bp, Artificial
  oligonucleotide probe
agcgcctcgacgggaa

SEQ ID NO: 29941 - DNA, 16 bp, Artificial
  oligonucleotide probe
gagccgagtggcgtcc

SEQ ID NO: 29942 - DNA, 16 bp, Artificial
  oligonucleotide probe
gagccgagtggcgtcc

SEQ ID NO: 29943 - DNA, 16 bp, Artificial
  oligonucleotide probe
gagccgagtggcgtcc

SEQ ID NO: 29944 - DNA, 16 bp, Artificial
  oligonucleotide probe
gagccgagtggcgtcc

SEQ ID NO: 29945 - DNA, 16 bp, Artificial
  oligonucleotide probe
gagccgagtggcgtcc

SEQ ID NO: 29946 - DNA, 16 bp, Artificial
  oligonucleotide probe
gagccgagtggcgtcc

SEQ ID NO: 29947 - DNA, 16 bp, Artificial
  oligonucleotide probe
gcgaacgccctccagg

SEQ ID NO: 29948 - DNA, 16 bp, Artificial
  oligonucleotide probe
gcgaacgccctccagg

SEQ ID NO: 29949 - DNA, 16 bp, Artificial
  oligonucleotide probe
gagccgagtggcgtcc

SEQ ID NO: 29950 - DNA, 16 bp, Artificial
  oligonucleotide probe
gagccgagtggcgtcc

SEQ ID NO: 29951 - DNA, 16 bp, Artificial
  oligonucleotide probe
gcgacacccggaacgc

SEQ ID NO: 29952 - DNA, 16 bp, Artificial
  oligonucleotide probe
gcgacacccggaacgc

SEQ ID NO: 29953 - DNA, 16 bp, Artificial
  oligonucleotide probe
cggagacgcagggggt

SEQ ID NO: 29954 - DNA, 16 bp, Artificial
  oligonucleotide probe
cggagacgcagggggt

SEQ ID NO: 29955 - DNA, 16 bp, Artificial
  oligonucleotide probe
agcgcctcgacgggaa

SEQ ID NO: 29956 - DNA, 16 bp, Artificial
  oligonucleotide probe
agcgcctcgacgggaa

SEQ ID NO: 29957 - DNA, 16 bp, Artificial
  oligonucleotide probe
gagccgagtggcgtcc

SEQ ID NO: 29958 - DNA, 16 bp, Artificial
  oligonucleotide probe
gagccgagtggcgtcc

SEQ ID NO: 29959 - DNA, 16 bp, Artificial
  oligonucleotide probe
gtccccaaagcggcag

SEQ ID NO: 29960 - DNA, 16 bp, Artificial
  oligonucleotide probe
gtccccaaagcggcag

SEQ ID NO: 29961 - DNA, 16 bp, Artificial
  oligonucleotide probe
gagccgagtggcgtcc

SEQ ID NO: 29962 - DNA, 16 bp, Artificial
  oligonucleotide probe
gagccgagtggcgtcc

SEQ ID NO: 29963 - DNA, 16 bp, Artificial
  oligonucleotide probe
gagcgggtgtggagcg

SEQ ID NO: 29964 - DNA, 16 bp, Artificial
  oligonucleotide probe
gagcgggtgtggagcg

SEQ ID NO: 29965 - DNA, 16 bp, Artificial
  oligonucleotide probe
ggtcgagctggcgcag

SEQ ID NO: 29966 - DNA, 16 bp, Artificial
  oligonucleotide probe
ggtcgagctggcgcag

SEQ ID NO: 29967 - DNA, 16 bp, Artificial
  oligonucleotide probe
gagcgggtgtggagcg

SEQ ID NO: 29968 - DNA, 16 bp, Artificial
  oligonucleotide probe
gagcgggtgtggagcg

SEQ ID NO: 29969 - DNA, 16 bp, Artificial
  oligonucleotide probe
gcagcgagcgagggaa

SEQ ID NO: 29970 - DNA, 16 bp, Artificial
  oligonucleotide probe
gcagcgagcgagggaa

SEQ ID NO: 29971 - DNA, 16 bp, Artificial
  oligonucleotide probe
acgctgctgcgaacca

SEQ ID NO: 29972 - DNA, 16 bp, Artificial
  oligonucleotide probe
acgctgctgcgaacca

SEQ ID NO: 29973 - DNA, 16 bp, Artificial
  oligonucleotide probe
gcgacacccggaacgc

SEQ ID NO: 29974 - DNA, 16 bp, Artificial
  oligonucleotide probe
gcgacacccggaacgc

SEQ ID NO: 29975 - DNA, 16 bp, Artificial
  oligonucleotide probe
gcgacacccggaacgc

SEQ ID NO: 29976 - DNA, 16 bp, Artificial
  oligonucleotide probe
gcgacacccggaacgc

SEQ ID NO: 29977 - DNA, 16 bp, Artificial
  oligonucleotide probe
cggagacgcagggggt

SEQ ID NO: 29978 - DNA, 16 bp, Artificial
  oligonucleotide probe
cggagacgcagggggt

SEQ ID NO: 29979 - DNA, 16 bp, Artificial
  oligonucleotide probe
agcgcctcgacgggaa

SEQ ID NO: 29980 - DNA, 16 bp, Artificial
  oligonucleotide probe
agcgcctcgacgggaa

SEQ ID NO: 29981 - DNA, 16 bp, Artificial
  oligonucleotide probe
agcgcctcgacgggaa

SEQ ID NO: 29982 - DNA, 16 bp, Artificial
  oligonucleotide probe
agcgcctcgacgggaa

SEQ ID NO: 29983 - DNA, 16 bp, Artificial
  oligonucleotide probe
gagcgggtgtggagcg

SEQ ID NO: 29984 - DNA, 16 bp, Artificial
  oligonucleotide probe
gagcgggtgtggagcg

SEQ ID NO: 29985 - DNA, 16 bp, Artificial
  oligonucleotide probe
gcgacacccggaacgc

SEQ ID NO: 29986 - DNA, 16 bp, Artificial
  oligonucleotide probe
gcgacacccggaacgc

SEQ ID NO: 29987 - DNA, 16 bp, Artificial
  oligonucleotide probe
gagcgggtgtggagcg

SEQ ID NO: 29988 - DNA, 16 bp, Artificial
  oligonucleotide probe
gagcgggtgtggagcg

SEQ ID NO: 29989 - DNA, 16 bp, Artificial
  oligonucleotide probe
acgctgctgcgaacca

SEQ ID NO: 29990 - DNA, 16 bp, Artificial
  oligonucleotide probe
acgctgctgcgaacca

SEQ ID NO: 29991 - DNA, 16 bp, Artificial
  oligonucleotide probe
agcgcaggagacgcct

SEQ ID NO: 29992 - DNA, 16 bp, Artificial
  oligonucleotide probe
agcgcaggagacgcct

SEQ ID NO: 29993 - DNA, 16 bp, Artificial
  oligonucleotide probe
gtccgcaggtccgcct

SEQ ID NO: 29994 - DNA, 16 bp, Artificial
  oligonucleotide probe
gtccgcaggtccgcct

SEQ ID NO: 29995 - DNA, 16 bp, Artificial
  oligonucleotide probe
gagccgagtggcgtcc

SEQ ID NO: 29996 - DNA, 16 bp, Artificial
  oligonucleotide probe
gagccgagtggcgtcc

SEQ ID NO: 29997 - DNA, 16 bp, Artificial
  oligonucleotide probe
agcgcctcgacgggaa

SEQ ID NO: 29998 - DNA, 16 bp, Artificial
  oligonucleotide probe
agcgcctcgacgggaa

SEQ ID NO: 29999 - DNA, 16 bp, Artificial
  oligonucleotide probe
gcgacacccggaacgc

SEQ ID NO: 30000 - DNA, 16 bp, Artificial
  oligonucleotide probe
gcgacacccggaacgc

SEQ ID NO: 30001 - DNA, 16 bp, Artificial
  oligonucleotide probe
gcgaacgccctccagg

SEQ ID NO: 30002 - DNA, 16 bp, Artificial
  oligonucleotide probe
gcgaacgccctccagg

SEQ ID NO: 30003 - DNA, 16 bp, Artificial
  oligonucleotide probe
agcgcctcgacgggaa

SEQ ID NO: 30004 - DNA, 16 bp, Artificial
  oligonucleotide probe
agcgcctcgacgggaa

SEQ ID NO: 30005 - DNA, 16 bp, Artificial
  oligonucleotide probe
gagccgagtggcgtcc

SEQ ID NO: 30006 - DNA, 16 bp, Artificial
  oligonucleotide probe
gagccgagtggcgtcc

SEQ ID NO: 30007 - DNA, 16 bp, Artificial
  oligonucleotide probe
cggatgctgcgagcag

SEQ ID NO: 30008 - DNA, 16 bp, Artificial
  oligonucleotide probe
cggatgctgcgagcag

SEQ ID NO: 30009 - DNA, 16 bp, Artificial
  oligonucleotide probe
gcagcgagcgagggaa

SEQ ID NO: 30010 - DNA, 16 bp, Artificial
  oligonucleotide probe
gcagcgagcgagggaa

SEQ ID NO: 30011 - DNA, 16 bp, Artificial
  oligonucleotide probe
gagccgagtggcgtcc

SEQ ID NO: 30012 - DNA, 16 bp, Artificial
  oligonucleotide probe
gagccgagtggcgtcc

SEQ ID NO: 30013 - DNA, 16 bp, Artificial
  oligonucleotide probe
gcgacacccggaacgc

SEQ ID NO: 30014 - DNA, 16 bp, Artificial
  oligonucleotide probe
gcgacacccggaacgc

SEQ ID NO: 30015 - DNA, 16 bp, Artificial
  oligonucleotide probe
gtccgcaggtccgcct

SEQ ID NO: 30016 - DNA, 16 bp, Artificial
  oligonucleotide probe
gtccgcaggtccgcct

SEQ ID NO: 30017 - DNA, 16 bp, Artificial
  oligonucleotide probe
agcgcaggagacgcct

SEQ ID NO: 30018 - DNA, 16 bp, Artificial
  oligonucleotide probe
agcgcaggagacgcct

SEQ ID NO: 30019 - DNA, 16 bp, Artificial
  oligonucleotide probe
ggtcgagctggcgcag

SEQ ID NO: 30020 - DNA, 16 bp, Artificial
  oligonucleotide probe
ggtcgagctggcgcag

SEQ ID NO: 30021 - DNA, 16 bp, Artificial
  oligonucleotide probe
gagccgagtggcgtcc

SEQ ID NO: 30022 - DNA, 16 bp, Artificial
  oligonucleotide probe
gagccgagtggcgtcc

SEQ ID NO: 30023 - DNA, 16 bp, Artificial
  oligonucleotide probe
agcgcctcgacgggaa

SEQ ID NO: 30024 - DNA, 16 bp, Artificial
  oligonucleotide probe
agcgcctcgacgggaa

SEQ ID NO: 30025 - DNA, 16 bp, Artificial
  oligonucleotide probe
gcgacacccggaacgc

SEQ ID NO: 30026 - DNA, 16 bp, Artificial
  oligonucleotide probe
gcgacacccggaacgc

SEQ ID NO: 30027 - DNA, 16 bp, Artificial
  oligonucleotide probe
gagccgagtggcgtcc

SEQ ID NO: 30028 - DNA, 16 bp, Artificial
  oligonucleotide probe
gagccgagtggcgtcc

SEQ ID NO: 30029 - DNA, 16 bp, Artificial
  oligonucleotide probe
gcgacacccggaacgc

SEQ ID NO: 30030 - DNA, 16 bp, Artificial
  oligonucleotide probe
gcgacacccggaacgc

SEQ ID NO: 30031 - DNA, 16 bp, Artificial
  oligonucleotide probe
tcaccggagccttggc

SEQ ID NO: 30032 - DNA, 16 bp, Artificial
  oligonucleotide probe
tcaccggagccttggc

SEQ ID NO: 30033 - DNA, 16 bp, Artificial
  oligonucleotide probe
tcaccggagccttggc

SEQ ID NO: 30034 - DNA, 16 bp, Artificial
  oligonucleotide probe
tcaccggagccttggc

SEQ ID NO: 30035 - DNA, 16 bp, Artificial
  oligonucleotide probe
gagccgagtggcgtcc

SEQ ID NO: 30036 - DNA, 16 bp, Artificial
  oligonucleotide probe
gagccgagtggcgtcc

SEQ ID NO: 30037 - DNA, 16 bp, Artificial
  oligonucleotide probe
gtgggcctcctcccaa

SEQ ID NO: 30038 - DNA, 16 bp, Artificial
  oligonucleotide probe
gtgggcctcctcccaa

SEQ ID NO: 30039 - DNA, 16 bp, Artificial
  oligonucleotide probe
gagccgagtggcgtcc

SEQ ID NO: 30040 - DNA, 16 bp, Artificial
  oligonucleotide probe
gagccgagtggcgtcc

SEQ ID NO: 30041 - DNA, 16 bp, Artificial
  oligonucleotide probe
cggagacgcagggggt

SEQ ID NO: 30042 - DNA, 16 bp, Artificial
  oligonucleotide probe
cggagacgcagggggt

SEQ ID NO: 30043 - DNA, 16 bp, Artificial
  oligonucleotide probe
gagccgagtggcgtcc

SEQ ID NO: 30044 - DNA, 16 bp, Artificial
  oligonucleotide probe
gagccgagtggcgtcc

SEQ ID NO: 30045 - DNA, 16 bp, Artificial
  oligonucleotide probe
gacgagcgcaccgcag

SEQ ID NO: 30046 - DNA, 16 bp, Artificial
  oligonucleotide probe
gacgagcgcaccgcag

SEQ ID NO: 30047 - DNA, 16 bp, Artificial
  oligonucleotide probe
gcagcgagcgagggaa

SEQ ID NO: 30048 - DNA, 16 bp, Artificial
  oligonucleotide probe
gcagcgagcgagggaa

SEQ ID NO: 30049 - DNA, 16 bp, Artificial
  oligonucleotide probe
gcgacacccggaacgc

SEQ ID NO: 30050 - DNA, 16 bp, Artificial
  oligonucleotide probe
gcgacacccggaacgc

SEQ ID NO: 30051 - DNA, 16 bp, Artificial
  oligonucleotide probe
tcaccggagccttggc

SEQ ID NO: 30052 - DNA, 16 bp, Artificial
  oligonucleotide probe
tcaccggagccttggc

SEQ ID NO: 30053 - DNA, 16 bp, Artificial
  oligonucleotide probe
agcgcctcgacgggaa

SEQ ID NO: 30054 - DNA, 16 bp, Artificial
  oligonucleotide probe
agcgcctcgacgggaa

SEQ ID NO: 30055 - DNA, 16 bp, Artificial
  oligonucleotide probe
gcgaacgccctccagg

SEQ ID NO: 30056 - DNA, 16 bp, Artificial
  oligonucleotide probe
gcgaacgccctccagg

SEQ ID NO: 30057 - DNA, 16 bp, Artificial
  oligonucleotide probe
cggatgctgcgagcag

SEQ ID NO: 30058 - DNA, 16 bp, Artificial
  oligonucleotide probe
cggatgctgcgagcag

SEQ ID NO: 30059 - DNA, 16 bp, Artificial
  oligonucleotide probe
gagccgagtggcgtcc

SEQ ID NO: 30060 - DNA, 16 bp, Artificial
  oligonucleotide probe
gagccgagtggcgtcc

SEQ ID NO: 30061 - DNA, 16 bp, Artificial
  oligonucleotide probe
gcgacacccggaacgc

SEQ ID NO: 30062 - DNA, 16 bp, Artificial
  oligonucleotide probe
gcgacacccggaacgc

SEQ ID NO: 30063 - DNA, 16 bp, Artificial
  oligonucleotide probe
gagccgagtggcgtcc

SEQ ID NO: 30064 - DNA, 16 bp, Artificial
  oligonucleotide probe
gagccgagtggcgtcc

SEQ ID NO: 30065 - DNA, 16 bp, Artificial
  oligonucleotide probe
gagccgagtggcgtcc

SEQ ID NO: 30066 - DNA, 16 bp, Artificial
  oligonucleotide probe
gagccgagtggcgtcc

SEQ ID NO: 30067 - DNA, 16 bp, Artificial
  oligonucleotide probe
gcgacacccggaacgc

SEQ ID NO: 30068 - DNA, 16 bp, Artificial
  oligonucleotide probe
gcgacacccggaacgc

SEQ ID NO: 30069 - DNA, 16 bp, Artificial
  oligonucleotide probe
gtgggcctcctcccaa

SEQ ID NO: 30070 - DNA, 16 bp, Artificial
  oligonucleotide probe
gtgggcctcctcccaa

SEQ ID NO: 30071 - DNA, 16 bp, Artificial
  oligonucleotide probe
agcgcctcgacgggaa

SEQ ID NO: 30072 - DNA, 16 bp, Artificial
  oligonucleotide probe
agcgcctcgacgggaa

SEQ ID NO: 30073 - DNA, 16 bp, Artificial
  oligonucleotide probe
gtccgcaggtccgcct

SEQ ID NO: 30074 - DNA, 16 bp, Artificial
  oligonucleotide probe
gtccgcaggtccgcct

SEQ ID NO: 30075 - DNA, 16 bp, Artificial
  oligonucleotide probe
gcagcgagcgagggaa

SEQ ID NO: 30076 - DNA, 16 bp, Artificial
  oligonucleotide probe
gcagcgagcgagggaa

SEQ ID NO: 30077 - DNA, 16 bp, Artificial
  oligonucleotide probe
gagcgggtgtggagcg

SEQ ID NO: 30078 - DNA, 16 bp, Artificial
  oligonucleotide probe
gagcgggtgtggagcg

SEQ ID NO: 30079 - DNA, 16 bp, Artificial
  oligonucleotide probe
gagcgggtgtggagcg

SEQ ID NO: 30080 - DNA, 16 bp, Artificial
  oligonucleotide probe
gagcgggtgtggagcg

SEQ ID NO: 30081 - DNA, 16 bp, Artificial
  oligonucleotide probe
gtccgcaggtccgcct

SEQ ID NO: 30082 - DNA, 16 bp, Artificial
  oligonucleotide probe
gtccgcaggtccgcct

SEQ ID NO: 30083 - DNA, 16 bp, Artificial
  oligonucleotide probe
gtccccaaagcggcag

SEQ ID NO: 30084 - DNA, 16 bp, Artificial
  oligonucleotide probe
gtccccaaagcggcag

SEQ ID NO: 30085 - DNA, 16 bp, Artificial
  oligonucleotide probe
gagccgagtggcgtcc

SEQ ID NO: 30086 - DNA, 16 bp, Artificial
  oligonucleotide probe
gagccgagtggcgtcc

SEQ ID NO: 30087 - DNA, 16 bp, Artificial
  oligonucleotide probe
cggatgctgcgagcag

SEQ ID NO: 30088 - DNA, 16 bp, Artificial
  oligonucleotide probe
cggatgctgcgagcag

SEQ ID NO: 30089 - DNA, 16 bp, Artificial
  oligonucleotide probe
gagcgggtgtggagcg

SEQ ID NO: 30090 - DNA, 16 bp, Artificial
  oligonucleotide probe
gagcgggtgtggagcg

SEQ ID NO: 30091 - DNA, 16 bp, Artificial
  oligonucleotide probe
gacgagcgcaccgcag

SEQ ID NO: 30092 - DNA, 16 bp, Artificial
  oligonucleotide probe
gacgagcgcaccgcag

SEQ ID NO: 30093 - DNA, 16 bp, Artificial
  oligonucleotide probe
agcgcctcgacgggaa

SEQ ID NO: 30094 - DNA, 16 bp, Artificial
  oligonucleotide probe
agcgcctcgacgggaa

SEQ ID NO: 30095 - DNA, 16 bp, Artificial
  oligonucleotide probe
gtgggcctcctcccaa

SEQ ID NO: 30096 - DNA, 16 bp, Artificial
  oligonucleotide probe
gtgggcctcctcccaa

SEQ ID NO: 30097 - DNA, 16 bp, Artificial
  oligonucleotide probe
gacgagcgcaccgcag

SEQ ID NO: 30098 - DNA, 16 bp, Artificial
  oligonucleotide probe
gacgagcgcaccgcag

SEQ ID NO: 30099 - DNA, 16 bp, Artificial
  oligonucleotide probe
gcgaacgccctccagg

SEQ ID NO: 30100 - DNA, 16 bp, Artificial
  oligonucleotide probe
gcgaacgccctccagg

SEQ ID NO: 30101 - DNA, 16 bp, Artificial
  oligonucleotide probe
gcgacacccggaacgc

SEQ ID NO: 30102 - DNA, 16 bp, Artificial
  oligonucleotide probe
gcgacacccggaacgc

SEQ ID NO: 30103 - DNA, 16 bp, Artificial
  oligonucleotide probe
gtccccaaagcggcag

SEQ ID NO: 30104 - DNA, 16 bp, Artificial
  oligonucleotide probe
gtccccaaagcggcag

SEQ ID NO: 30105 - DNA, 16 bp, Artificial
  oligonucleotide probe
agcgcctcgacgggaa

SEQ ID NO: 30106 - DNA, 16 bp, Artificial
  oligonucleotide probe
agcgcctcgacgggaa

SEQ ID NO: 30107 - DNA, 16 bp, Artificial
  oligonucleotide probe
cggagacgcagggggt

SEQ ID NO: 30108 - DNA, 16 bp, Artificial
  oligonucleotide probe
cggagacgcagggggt

SEQ ID NO: 30109 - DNA, 16 bp, Artificial
  oligonucleotide probe
agcgcctcgacgggaa

SEQ ID NO: 30110 - DNA, 16 bp, Artificial
  oligonucleotide probe
agcgcctcgacgggaa

SEQ ID NO: 30111 - DNA, 16 bp, Artificial
  oligonucleotide probe
gagccgagtggcgtcc

SEQ ID NO: 30112 - DNA, 16 bp, Artificial
  oligonucleotide probe
gagccgagtggcgtcc

SEQ ID NO: 30113 - DNA, 16 bp, Artificial
  oligonucleotide probe
gcgacacccggaacgc

SEQ ID NO: 30114 - DNA, 16 bp, Artificial
  oligonucleotide probe
gcgacacccggaacgc

SEQ ID NO: 30115 - DNA, 16 bp, Artificial
  oligonucleotide probe
gagcgggtgtggagcg

SEQ ID NO: 30116 - DNA, 16 bp, Artificial
  oligonucleotide probe
gagcgggtgtggagcg

SEQ ID NO: 30117 - DNA, 16 bp, Artificial
  oligonucleotide probe
gtgggcctcctcccaa

SEQ ID NO: 30118 - DNA, 16 bp, Artificial
  oligonucleotide probe
gtgggcctcctcccaa

SEQ ID NO: 30119 - DNA, 16 bp, Artificial
  oligonucleotide probe
agcgcaggagacgcct

SEQ ID NO: 30120 - DNA, 16 bp, Artificial
  oligonucleotide probe
agcgcaggagacgcct

SEQ ID NO: 30121 - DNA, 16 bp, Artificial
  oligonucleotide probe
gtgggcctcctcccaa

SEQ ID NO: 30122 - DNA, 16 bp, Artificial
  oligonucleotide probe
gtgggcctcctcccaa

SEQ ID NO: 30123 - DNA, 16 bp, Artificial
  oligonucleotide probe
gcgacacccggaacgc

SEQ ID NO: 30124 - DNA, 16 bp, Artificial
  oligonucleotide probe
gcgacacccggaacgc

SEQ ID NO: 30125 - DNA, 16 bp, Artificial
  oligonucleotide probe
gcgaacgccctccagg

SEQ ID NO: 30126 - DNA, 16 bp, Artificial
  oligonucleotide probe
gcgaacgccctccagg

SEQ ID NO: 30127 - DNA, 16 bp, Artificial
  oligonucleotide probe
cggatgctgcgagcag

SEQ ID NO: 30128 - DNA, 16 bp, Artificial
  oligonucleotide probe
cggatgctgcgagcag

SEQ ID NO: 30129 - DNA, 16 bp, Artificial
  oligonucleotide probe
gtgggcctcctcccaa

SEQ ID NO: 30130 - DNA, 16 bp, Artificial
  oligonucleotide probe
gtgggcctcctcccaa

SEQ ID NO: 30131 - DNA, 16 bp, Artificial
  oligonucleotide probe
cggagacgcagggggt

SEQ ID NO: 30132 - DNA, 16 bp, Artificial
  oligonucleotide probe
cggagacgcagggggt

SEQ ID NO: 30133 - DNA, 16 bp, Artificial
  oligonucleotide probe
gcgacacccggaacgc

SEQ ID NO: 30134 - DNA, 16 bp, Artificial
  oligonucleotide probe
gcgacacccggaacgc

SEQ ID NO: 30135 - DNA, 16 bp, Artificial
  oligonucleotide probe
acgctgctgcgaacca

SEQ ID NO: 30136 - DNA, 16 bp, Artificial
  oligonucleotide probe
acgctgctgcgaacca

SEQ ID NO: 30137 - DNA, 16 bp, Artificial
  oligonucleotide probe
acgctgctgcgaacca

SEQ ID NO: 30138 - DNA, 16 bp, Artificial
  oligonucleotide probe
acgctgctgcgaacca

SEQ ID NO: 30139 - DNA, 16 bp, Artificial
  oligonucleotide probe
agcgcctcgacgggaa

SEQ ID NO: 30140 - DNA, 16 bp, Artificial
  oligonucleotide probe
agcgcctcgacgggaa

SEQ ID NO: 30141 - DNA, 16 bp, Artificial
  oligonucleotide probe
gcgacacccggaacgc

SEQ ID NO: 30142 - DNA, 16 bp, Artificial
  oligonucleotide probe
gcgacacccggaacgc

SEQ ID NO: 30143 - DNA, 16 bp, Artificial
  oligonucleotide probe
gcagcgagcgagggaa

SEQ ID NO: 30144 - DNA, 16 bp, Artificial
  oligonucleotide probe
gcagcgagcgagggaa

SEQ ID NO: 30145 - DNA, 16 bp, Artificial
  oligonucleotide probe
gtccgcaggtccgcct

SEQ ID NO: 30146 - DNA, 16 bp, Artificial
  oligonucleotide probe
gtccgcaggtccgcct

SEQ ID NO: 30147 - DNA, 16 bp, Artificial
  oligonucleotide probe
gcagcgagcgagggaa

SEQ ID NO: 30148 - DNA, 16 bp, Artificial
  oligonucleotide probe
gcagcgagcgagggaa

SEQ ID NO: 30149 - DNA, 16 bp, Artificial
  oligonucleotide probe
gcagcgagcgagggaa

SEQ ID NO: 30150 - DNA, 16 bp, Artificial
  oligonucleotide probe
gcagcgagcgagggaa

SEQ ID NO: 30151 - DNA, 16 bp, Artificial
  oligonucleotide probe
cggatgctgcgagcag

SEQ ID NO: 30152 - DNA, 16 bp, Artificial
  oligonucleotide probe
cggatgctgcgagcag

SEQ ID NO: 30153 - DNA, 16 bp, Artificial
  oligonucleotide probe
gagccgagtggcgtcc

SEQ ID NO: 30154 - DNA, 16 bp, Artificial
  oligonucleotide probe
gagccgagtggcgtcc

SEQ ID NO: 30155 - DNA, 16 bp, Artificial
  oligonucleotide probe
agcgcctcgacgggaa

SEQ ID NO: 30156 - DNA, 16 bp, Artificial
  oligonucleotide probe
agcgcctcgacgggaa

SEQ ID NO: 30157 - DNA, 16 bp, Artificial
  oligonucleotide probe
tcaccggagccttggc

SEQ ID NO: 30158 - DNA, 16 bp, Artificial
  oligonucleotide probe
tcaccggagccttggc

SEQ ID NO: 30159 - DNA, 16 bp, Artificial
  oligonucleotide probe
gcgaacgccctccagg

SEQ ID NO: 30160 - DNA, 16 bp, Artificial
  oligonucleotide probe
gcgaacgccctccagg

SEQ ID NO: 30161 - DNA, 16 bp, Artificial
  oligonucleotide probe
agcgcctcgacgggaa

SEQ ID NO: 30162 - DNA, 16 bp, Artificial
  oligonucleotide probe
agcgcctcgacgggaa

SEQ ID NO: 30163 - DNA, 16 bp, Artificial
  oligonucleotide probe
gcagcgagcgagggaa

SEQ ID NO: 30164 - DNA, 16 bp, Artificial
  oligonucleotide probe
gcagcgagcgagggaa

SEQ ID NO: 30165 - DNA, 16 bp, Artificial
  oligonucleotide probe
gtccgcaggtccgcct

SEQ ID NO: 30166 - DNA, 16 bp, Artificial
  oligonucleotide probe
gtccgcaggtccgcct

SEQ ID NO: 30167 - DNA, 16 bp, Artificial
  oligonucleotide probe
gcgaacgccctccagg

SEQ ID NO: 30168 - DNA, 16 bp, Artificial
  oligonucleotide probe
gcgaacgccctccagg

SEQ ID NO: 30169 - DNA, 16 bp, Artificial
  oligonucleotide probe
gacgagcgcaccgcag

SEQ ID NO: 30170 - DNA, 16 bp, Artificial
  oligonucleotide probe
gacgagcgcaccgcag

SEQ ID NO: 30171 - DNA, 16 bp, Artificial
  oligonucleotide probe
gcagcgagcgagggaa

SEQ ID NO: 30172 - DNA, 16 bp, Artificial
  oligonucleotide probe
gcagcgagcgagggaa

SEQ ID NO: 30173 - DNA, 16 bp, Artificial
  oligonucleotide probe
gtccgcaggtccgcct

SEQ ID NO: 30174 - DNA, 16 bp, Artificial
  oligonucleotide probe
gtccgcaggtccgcct

SEQ ID NO: 30175 - DNA, 16 bp, Artificial
  oligonucleotide probe
gcagcgagcgagggaa

SEQ ID NO: 30176 - DNA, 16 bp, Artificial
  oligonucleotide probe
gcagcgagcgagggaa

SEQ ID NO: 30177 - DNA, 16 bp, Artificial
  oligonucleotide probe
gcgacacccggaacgc

SEQ ID NO: 30178 - DNA, 16 bp, Artificial
  oligonucleotide probe
gcgacacccggaacgc

SEQ ID NO: 30179 - DNA, 16 bp, Artificial
  oligonucleotide probe
cggagacgcagggggt

SEQ ID NO: 30180 - DNA, 16 bp, Artificial
  oligonucleotide probe
cggagacgcagggggt

SEQ ID NO: 30181 - DNA, 16 bp, Artificial
  oligonucleotide probe
gtccgcaggtccgcct

SEQ ID NO: 30182 - DNA, 16 bp, Artificial
  oligonucleotide probe
gtccgcaggtccgcct

SEQ ID NO: 30183 - DNA, 16 bp, Artificial
  oligonucleotide probe
gcagcgagcgagggaa

SEQ ID NO: 30184 - DNA, 16 bp, Artificial
  oligonucleotide probe
gcagcgagcgagggaa

SEQ ID NO: 30185 - DNA, 16 bp, Artificial
  oligonucleotide probe
gtgggcctcctcccaa

SEQ ID NO: 30186 - DNA, 16 bp, Artificial
  oligonucleotide probe
gtgggcctcctcccaa

SEQ ID NO: 30187 - DNA, 16 bp, Artificial
  oligonucleotide probe
gcgaacgccctccagg

SEQ ID NO: 30188 - DNA, 16 bp, Artificial
  oligonucleotide probe
gcgaacgccctccagg

SEQ ID NO: 30189 - DNA, 16 bp, Artificial
  oligonucleotide probe
agcgcctcgacgggaa

SEQ ID NO: 30190 - DNA, 16 bp, Artificial
  oligonucleotide probe
agcgcctcgacgggaa

SEQ ID NO: 30191 - DNA, 16 bp, Artificial
  oligonucleotide probe
agcgcctcgacgggaa

SEQ ID NO: 30192 - DNA, 16 bp, Artificial
  oligonucleotide probe
agcgcctcgacgggaa

SEQ ID NO: 30193 - DNA, 16 bp, Artificial
  oligonucleotide probe
gcgacacccggaacgc

SEQ ID NO: 30194 - DNA, 16 bp, Artificial
  oligonucleotide probe
gcgacacccggaacgc

SEQ ID NO: 30195 - DNA, 16 bp, Artificial
  oligonucleotide probe
agcgcctcgacgggaa

SEQ ID NO: 30196 - DNA, 16 bp, Artificial
  oligonucleotide probe
agcgcctcgacgggaa

SEQ ID NO: 30197 - DNA, 16 bp, Artificial
  oligonucleotide probe
agcgcctcgacgggaa

SEQ ID NO: 30198 - DNA, 16 bp, Artificial
  oligonucleotide probe
agcgcctcgacgggaa

SEQ ID NO: 30199 - DNA, 16 bp, Artificial
  oligonucleotide probe
tcaccggagccttggc

SEQ ID NO: 30200 - DNA, 16 bp, Artificial
  oligonucleotide probe
tcaccggagccttggc

SEQ ID NO: 30201 - DNA, 16 bp, Artificial
  oligonucleotide probe
gagcgggtgtggagcg

SEQ ID NO: 30202 - DNA, 16 bp, Artificial
  oligonucleotide probe
gagcgggtgtggagcg

SEQ ID NO: 30203 - DNA, 16 bp, Artificial
  oligonucleotide probe
gtccccaaagcggcag

SEQ ID NO: 30204 - DNA, 16 bp, Artificial
  oligonucleotide probe
gtccccaaagcggcag

SEQ ID NO: 30205 - DNA, 16 bp, Artificial
  oligonucleotide probe
agcgcctcgacgggaa

SEQ ID NO: 30206 - DNA, 16 bp, Artificial
  oligonucleotide probe
agcgcctcgacgggaa

SEQ ID NO: 30207 - DNA, 16 bp, Artificial
  oligonucleotide probe
acgctgctgcgaacca

SEQ ID NO: 30208 - DNA, 16 bp, Artificial
  oligonucleotide probe
acgctgctgcgaacca

SEQ ID NO: 30209 - DNA, 16 bp, Artificial
  oligonucleotide probe
gagcgggtgtggagcg

SEQ ID NO: 30210 - DNA, 16 bp, Artificial
  oligonucleotide probe
gagcgggtgtggagcg

SEQ ID NO: 30211 - DNA, 16 bp, Artificial
  oligonucleotide probe
gacgagcgcaccgcag

SEQ ID NO: 30212 - DNA, 16 bp, Artificial
  oligonucleotide probe
gacgagcgcaccgcag

SEQ ID NO: 30213 - DNA, 16 bp, Artificial
  oligonucleotide probe
cggagacgcagggggt

SEQ ID NO: 30214 - DNA, 16 bp, Artificial
  oligonucleotide probe
cggagacgcagggggt

SEQ ID NO: 30215 - DNA, 16 bp, Artificial
  oligonucleotide probe
gagcgggtgtggagcg

SEQ ID NO: 30216 - DNA, 16 bp, Artificial
  oligonucleotide probe
gagcgggtgtggagcg

SEQ ID NO: 30217 - DNA, 16 bp, Artificial
  oligonucleotide probe
agcgcaggagacgcct

SEQ ID NO: 30218 - DNA, 16 bp, Artificial
  oligonucleotide probe
agcgcaggagacgcct

SEQ ID NO: 30219 - DNA, 16 bp, Artificial
  oligonucleotide probe
cggatgctgcgagcag

SEQ ID NO: 30220 - DNA, 16 bp, Artificial
  oligonucleotide probe
cggatgctgcgagcag

SEQ ID NO: 30221 - DNA, 16 bp, Artificial
  oligonucleotide probe
acgctgctgcgaacca

SEQ ID NO: 30222 - DNA, 16 bp, Artificial
  oligonucleotide probe
acgctgctgcgaacca

SEQ ID NO: 30223 - DNA, 16 bp, Artificial
  oligonucleotide probe
tcaccggagccttggc

SEQ ID NO: 30224 - DNA, 16 bp, Artificial
  oligonucleotide probe
tcaccggagccttggc

SEQ ID NO: 30225 - DNA, 16 bp, Artificial
  oligonucleotide probe
agcgcctcgacgggaa

SEQ ID NO: 30226 - DNA, 16 bp, Artificial
  oligonucleotide probe
agcgcctcgacgggaa

SEQ ID NO: 30227 - DNA, 16 bp, Artificial
  oligonucleotide probe
agcgcaggagacgcct

SEQ ID NO: 30228 - DNA, 16 bp, Artificial
  oligonucleotide probe
agcgcaggagacgcct

SEQ ID NO: 30229 - DNA, 16 bp, Artificial
  oligonucleotide probe
gcagcgagcgagggaa

SEQ ID NO: 30230 - DNA, 16 bp, Artificial
  oligonucleotide probe
gcagcgagcgagggaa

SEQ ID NO: 30231 - DNA, 16 bp, Artificial
  oligonucleotide probe
gacgagcgcaccgcag

SEQ ID NO: 30232 - DNA, 16 bp, Artificial
  oligonucleotide probe
gacgagcgcaccgcag

SEQ ID NO: 30233 - DNA, 16 bp, Artificial
  oligonucleotide probe
gcgacacccggaacgc

SEQ ID NO: 30234 - DNA, 16 bp, Artificial
  oligonucleotide probe
gcgacacccggaacgc

SEQ ID NO: 30235 - DNA, 16 bp, Artificial
  oligonucleotide probe
gagccgagtggcgtcc

SEQ ID NO: 30236 - DNA, 16 bp, Artificial
  oligonucleotide probe
gagccgagtggcgtcc

SEQ ID NO: 30237 - DNA, 16 bp, Artificial
  oligonucleotide probe
gcagcgagcgagggaa

SEQ ID NO: 30238 - DNA, 16 bp, Artificial
  oligonucleotide probe
gcagcgagcgagggaa

SEQ ID NO: 30239 - DNA, 16 bp, Artificial
  oligonucleotide probe
gcgacacccggaacgc

SEQ ID NO: 30240 - DNA, 16 bp, Artificial
  oligonucleotide probe
gcgacacccggaacgc

SEQ ID NO: 30241 - DNA, 16 bp, Artificial
  oligonucleotide probe
cggagacgcagggggt

SEQ ID NO: 30242 - DNA, 16 bp, Artificial
  oligonucleotide probe
cggagacgcagggggt

SEQ ID NO: 30243 - DNA, 16 bp, Artificial
  oligonucleotide probe
ggtcgagctggcgcag

SEQ ID NO: 30244 - DNA, 16 bp, Artificial
  oligonucleotide probe
ggtcgagctggcgcag

SEQ ID NO: 30245 - DNA, 16 bp, Artificial
  oligonucleotide probe
gcagcgagcgagggaa

SEQ ID NO: 30246 - DNA, 16 bp, Artificial
  oligonucleotide probe
gcagcgagcgagggaa

SEQ ID NO: 30247 - DNA, 16 bp, Artificial
  oligonucleotide probe
gcagcgagcgagggaa

SEQ ID NO: 30248 - DNA, 16 bp, Artificial
  oligonucleotide probe
gcagcgagcgagggaa

SEQ ID NO: 30249 - DNA, 16 bp, Artificial
  oligonucleotide probe
gagccgagtggcgtcc

SEQ ID NO: 30250 - DNA, 16 bp, Artificial
  oligonucleotide probe
gagccgagtggcgtcc

SEQ ID NO: 30251 - DNA, 16 bp, Artificial
  oligonucleotide probe
gagcgggtgtggagcg

SEQ ID NO: 30252 - DNA, 16 bp, Artificial
  oligonucleotide probe
gagcgggtgtggagcg

SEQ ID NO: 30253 - DNA, 16 bp, Artificial
  oligonucleotide probe
agcgcaggagacgcct

SEQ ID NO: 30254 - DNA, 16 bp, Artificial
  oligonucleotide probe
agcgcaggagacgcct

SEQ ID NO: 30255 - DNA, 16 bp, Artificial
  oligonucleotide probe
gcgaacgccctccagg

SEQ ID NO: 30256 - DNA, 16 bp, Artificial
  oligonucleotide probe
gcgaacgccctccagg

SEQ ID NO: 30257 - DNA, 16 bp, Artificial
  oligonucleotide probe
gtgggcctcctcccaa

SEQ ID NO: 30258 - DNA, 16 bp, Artificial
  oligonucleotide probe
gtgggcctcctcccaa

SEQ ID NO: 30259 - DNA, 16 bp, Artificial
  oligonucleotide probe
agcgcctcgacgggaa

SEQ ID NO: 30260 - DNA, 16 bp, Artificial
  oligonucleotide probe
agcgcctcgacgggaa

SEQ ID NO: 30261 - DNA, 16 bp, Artificial
  oligonucleotide probe
tcaccggagccttggc

SEQ ID NO: 30262 - DNA, 16 bp, Artificial
  oligonucleotide probe
tcaccggagccttggc

SEQ ID NO: 30263 - DNA, 16 bp, Artificial
  oligonucleotide probe
acgctgctgcgaacca

SEQ ID NO: 30264 - DNA, 16 bp, Artificial
  oligonucleotide probe
acgctgctgcgaacca

SEQ ID NO: 30265 - DNA, 16 bp, Artificial
  oligonucleotide probe
gcagcgagcgagggaa

SEQ ID NO: 30266 - DNA, 16 bp, Artificial
  oligonucleotide probe
gcagcgagcgagggaa

SEQ ID NO: 30267 - DNA, 16 bp, Artificial
  oligonucleotide probe
gcgacacccggaacgc

SEQ ID NO: 30268 - DNA, 16 bp, Artificial
  oligonucleotide probe
gcgacacccggaacgc

SEQ ID NO: 30269 - DNA, 16 bp, Artificial
  oligonucleotide probe
agcgcaggagacgcct

SEQ ID NO: 30270 - DNA, 16 bp, Artificial
  oligonucleotide probe
agcgcaggagacgcct

SEQ ID NO: 30271 - DNA, 16 bp, Artificial
  oligonucleotide probe
gagccgagtggcgtcc

SEQ ID NO: 30272 - DNA, 16 bp, Artificial
  oligonucleotide probe
gagccgagtggcgtcc

SEQ ID NO: 30273 - DNA, 16 bp, Artificial
  oligonucleotide probe
cggagacgcagggggt

SEQ ID NO: 30274 - DNA, 16 bp, Artificial
  oligonucleotide probe
cggagacgcagggggt

SEQ ID NO: 30275 - DNA, 16 bp, Artificial
  oligonucleotide probe
gacgagcgcaccgcag

SEQ ID NO: 30276 - DNA, 16 bp, Artificial
  oligonucleotide probe
gacgagcgcaccgcag

SEQ ID NO: 30277 - DNA, 16 bp, Artificial
  oligonucleotide probe
gagcgggtgtggagcg

SEQ ID NO: 30278 - DNA, 16 bp, Artificial
  oligonucleotide probe
gagcgggtgtggagcg

SEQ ID NO: 30279 - DNA, 16 bp, Artificial
  oligonucleotide probe
gtccgcaggtccgcct

SEQ ID NO: 30280 - DNA, 16 bp, Artificial
  oligonucleotide probe
gtccgcaggtccgcct

SEQ ID NO: 30281 - DNA, 16 bp, Artificial
  oligonucleotide probe
gcagcgagcgagggaa

SEQ ID NO: 30282 - DNA, 16 bp, Artificial
  oligonucleotide probe
gcagcgagcgagggaa

SEQ ID NO: 30283 - DNA, 16 bp, Artificial
  oligonucleotide probe
gcgacacccggaacgc

SEQ ID NO: 30284 - DNA, 16 bp, Artificial
  oligonucleotide probe
gcgacacccggaacgc

SEQ ID NO: 30285 - DNA, 16 bp, Artificial
  oligonucleotide probe
tcaccggagccttggc

SEQ ID NO: 30286 - DNA, 16 bp, Artificial
  oligonucleotide probe
tcaccggagccttggc

SEQ ID NO: 30287 - DNA, 16 bp, Artificial
  oligonucleotide probe
agcgcaggagacgcct

SEQ ID NO: 30288 - DNA, 16 bp, Artificial
  oligonucleotide probe
agcgcaggagacgcct

SEQ ID NO: 30289 - DNA, 16 bp, Artificial
  oligonucleotide probe
gtccgcaggtccgcct

SEQ ID NO: 30290 - DNA, 16 bp, Artificial
  oligonucleotide probe
gtccgcaggtccgcct

SEQ ID NO: 30291 - DNA, 16 bp, Artificial
  oligonucleotide probe
agcgcctcgacgggaa

SEQ ID NO: 30292 - DNA, 16 bp, Artificial
  oligonucleotide probe
agcgcctcgacgggaa

SEQ ID NO: 30293 - DNA, 16 bp, Artificial
  oligonucleotide probe
gagcgggtgtggagcg

SEQ ID NO: 30294 - DNA, 16 bp, Artificial
  oligonucleotide probe
gagcgggtgtggagcg

SEQ ID NO: 30295 - DNA, 16 bp, Artificial
  oligonucleotide probe
gacgagcgcaccgcag

SEQ ID NO: 30296 - DNA, 16 bp, Artificial
  oligonucleotide probe
gacgagcgcaccgcag

SEQ ID NO: 30297 - DNA, 16 bp, Artificial
  oligonucleotide probe
cggagacgcagggggt

SEQ ID NO: 30298 - DNA, 16 bp, Artificial
  oligonucleotide probe
cggagacgcagggggt

SEQ ID NO: 30299 - DNA, 16 bp, Artificial
  oligonucleotide probe
gcgaacgccctccagg

SEQ ID NO: 30300 - DNA, 16 bp, Artificial
  oligonucleotide probe
gcgaacgccctccagg

SEQ ID NO: 30301 - DNA, 16 bp, Artificial
  oligonucleotide probe
gcagcgagcgagggaa

SEQ ID NO: 30302 - DNA, 16 bp, Artificial
  oligonucleotide probe
gcagcgagcgagggaa

SEQ ID NO: 30303 - DNA, 16 bp, Artificial
  oligonucleotide probe
cggagacgcagggggt

SEQ ID NO: 30304 - DNA, 16 bp, Artificial
  oligonucleotide probe
cggagacgcagggggt

SEQ ID NO: 30305 - DNA, 16 bp, Artificial
  oligonucleotide probe
gagccgagtggcgtcc

SEQ ID NO: 30306 - DNA, 16 bp, Artificial
  oligonucleotide probe
gagccgagtggcgtcc

SEQ ID NO: 30307 - DNA, 16 bp, Artificial
  oligonucleotide probe
gagccgagtggcgtcc

SEQ ID NO: 30308 - DNA, 16 bp, Artificial
  oligonucleotide probe
gagccgagtggcgtcc

SEQ ID NO: 30309 - DNA, 16 bp, Artificial
  oligonucleotide probe
gagccgagtggcgtcc

SEQ ID NO: 30310 - DNA, 16 bp, Artificial
  oligonucleotide probe
gagccgagtggcgtcc

SEQ ID NO: 30311 - DNA, 16 bp, Artificial
  oligonucleotide probe
cggagacgcagggggt

SEQ ID NO: 30312 - DNA, 16 bp, Artificial
  oligonucleotide probe
cggagacgcagggggt

SEQ ID NO: 30313 - DNA, 16 bp, Artificial
  oligonucleotide probe
gcgacacccggaacgc

SEQ ID NO: 30314 - DNA, 16 bp, Artificial
  oligonucleotide probe
gcgacacccggaacgc

SEQ ID NO: 30315 - DNA, 16 bp, Artificial
  oligonucleotide probe
gacgagcgcaccgcag

SEQ ID NO: 30316 - DNA, 16 bp, Artificial
  oligonucleotide probe
gacgagcgcaccgcag

SEQ ID NO: 30317 - DNA, 16 bp, Artificial
  oligonucleotide probe
gtgggcctcctcccaa

SEQ ID NO: 30318 - DNA, 16 bp, Artificial
  oligonucleotide probe
gtgggcctcctcccaa

SEQ ID NO: 30319 - DNA, 16 bp, Artificial
  oligonucleotide probe
acgctgctgcgaacca

SEQ ID NO: 30320 - DNA, 16 bp, Artificial
  oligonucleotide probe
acgctgctgcgaacca

SEQ ID NO: 30321 - DNA, 16 bp, Artificial
  oligonucleotide probe
gagcgggtgtggagcg

SEQ ID NO: 30322 - DNA, 16 bp, Artificial
  oligonucleotide probe
gagcgggtgtggagcg

SEQ ID NO: 30323 - DNA, 16 bp, Artificial
  oligonucleotide probe
acgctgctgcgaacca

SEQ ID NO: 30324 - DNA, 16 bp, Artificial
  oligonucleotide probe
acgctgctgcgaacca

SEQ ID NO: 30325 - DNA, 16 bp, Artificial
  oligonucleotide probe
tcaccggagccttggc

SEQ ID NO: 30326 - DNA, 16 bp, Artificial
  oligonucleotide probe
tcaccggagccttggc

SEQ ID NO: 30327 - DNA, 16 bp, Artificial
  oligonucleotide probe
ggtcgagctggcgcag

SEQ ID NO: 30328 - DNA, 16 bp, Artificial
  oligonucleotide probe
ggtcgagctggcgcag

SEQ ID NO: 30329 - DNA, 16 bp, Artificial
  oligonucleotide probe
gcagcgagcgagggaa

SEQ ID NO: 30330 - DNA, 16 bp, Artificial
  oligonucleotide probe
gcagcgagcgagggaa

SEQ ID NO: 30331 - DNA, 16 bp, Artificial
  oligonucleotide probe
acgctgctgcgaacca

SEQ ID NO: 30332 - DNA, 16 bp, Artificial
  oligonucleotide probe
acgctgctgcgaacca

SEQ ID NO: 30333 - DNA, 16 bp, Artificial
  oligonucleotide probe
gtccccaaagcggcag

SEQ ID NO: 30334 - DNA, 16 bp, Artificial
  oligonucleotide probe
gtccccaaagcggcag

SEQ ID NO: 30335 - DNA, 16 bp, Artificial
  oligonucleotide probe
ggtcgagctggcgcag

SEQ ID NO: 30336 - DNA, 16 bp, Artificial
  oligonucleotide probe
ggtcgagctggcgcag

SEQ ID NO: 30337 - DNA, 16 bp, Artificial
  oligonucleotide probe
agcgcaggagacgcct

SEQ ID NO: 30338 - DNA, 16 bp, Artificial
  oligonucleotide probe
agcgcaggagacgcct

SEQ ID NO: 30339 - DNA, 16 bp, Artificial
  oligonucleotide probe
ggtcgagctggcgcag

SEQ ID NO: 30340 - DNA, 16 bp, Artificial
  oligonucleotide probe
ggtcgagctggcgcag

SEQ ID NO: 30341 - DNA, 16 bp, Artificial
  oligonucleotide probe
gtccgcaggtccgcct

SEQ ID NO: 30342 - DNA, 16 bp, Artificial
  oligonucleotide probe
gtccgcaggtccgcct

SEQ ID NO: 30343 - DNA, 16 bp, Artificial
  oligonucleotide probe
ggtcgagctggcgcag

SEQ ID NO: 30344 - DNA, 16 bp, Artificial
  oligonucleotide probe
ggtcgagctggcgcag

SEQ ID NO: 30345 - DNA, 16 bp, Artificial
  oligonucleotide probe
acgctgctgcgaacca

SEQ ID NO: 30346 - DNA, 16 bp, Artificial
  oligonucleotide probe
acgctgctgcgaacca

SEQ ID NO: 30347 - DNA, 16 bp, Artificial
  oligonucleotide probe
gagccgagtggcgtcc

SEQ ID NO: 30348 - DNA, 16 bp, Artificial
  oligonucleotide probe
gagccgagtggcgtcc

SEQ ID NO: 30349 - DNA, 16 bp, Artificial
  oligonucleotide probe
gcagcgagcgagggaa

SEQ ID NO: 30350 - DNA, 16 bp, Artificial
  oligonucleotide probe
gcagcgagcgagggaa

SEQ ID NO: 30351 - DNA, 16 bp, Artificial
  oligonucleotide probe
cggatgctgcgagcag

SEQ ID NO: 30352 - DNA, 16 bp, Artificial
  oligonucleotide probe
cggatgctgcgagcag

SEQ ID NO: 30353 - DNA, 16 bp, Artificial
  oligonucleotide probe
gcagcgagcgagggaa

SEQ ID NO: 30354 - DNA, 16 bp, Artificial
  oligonucleotide probe
gcagcgagcgagggaa

SEQ ID NO: 30355 - DNA, 16 bp, Artificial
  oligonucleotide probe
agcgcctcgacgggaa

SEQ ID NO: 30356 - DNA, 16 bp, Artificial
  oligonucleotide probe
agcgcctcgacgggaa

SEQ ID NO: 30357 - DNA, 16 bp, Artificial
  oligonucleotide probe
cggatgctgcgagcag

SEQ ID NO: 30358 - DNA, 16 bp, Artificial
  oligonucleotide probe
cggatgctgcgagcag

SEQ ID NO: 30359 - DNA, 16 bp, Artificial
  oligonucleotide probe
cggatgctgcgagcag

SEQ ID NO: 30360 - DNA, 16 bp, Artificial
  oligonucleotide probe
cggatgctgcgagcag

SEQ ID NO: 30361 - DNA, 16 bp, Artificial
  oligonucleotide probe
gcgacacccggaacgc

SEQ ID NO: 30362 - DNA, 16 bp, Artificial
  oligonucleotide probe
gcgacacccggaacgc

SEQ ID NO: 30363 - DNA, 16 bp, Artificial
  oligonucleotide probe
gagcgggtgtggagcg

SEQ ID NO: 30364 - DNA, 16 bp, Artificial
  oligonucleotide probe
gagcgggtgtggagcg

SEQ ID NO: 30365 - DNA, 16 bp, Artificial
  oligonucleotide probe
gtccgcaggtccgcct

SEQ ID NO: 30366 - DNA, 16 bp, Artificial
  oligonucleotide probe
gtccgcaggtccgcct

SEQ ID NO: 30367 - DNA, 16 bp, Artificial
  oligonucleotide probe
gcagcgagcgagggaa

SEQ ID NO: 30368 - DNA, 16 bp, Artificial
  oligonucleotide probe
gcagcgagcgagggaa

SEQ ID NO: 30369 - DNA, 16 bp, Artificial
  oligonucleotide probe
ggtcgagctggcgcag

SEQ ID NO: 30370 - DNA, 16 bp, Artificial
  oligonucleotide probe
ggtcgagctggcgcag

SEQ ID NO: 30371 - DNA, 16 bp, Artificial
  oligonucleotide probe
gagcgggtgtggagcg

SEQ ID NO: 30372 - DNA, 16 bp, Artificial
  oligonucleotide probe
gagcgggtgtggagcg

SEQ ID NO: 30373 - DNA, 16 bp, Artificial
  oligonucleotide probe
gacgagcgcaccgcag

SEQ ID NO: 30374 - DNA, 16 bp, Artificial
  oligonucleotide probe
gacgagcgcaccgcag

SEQ ID NO: 30375 - DNA, 16 bp, Artificial
  oligonucleotide probe
agcgcaggagacgcct

SEQ ID NO: 30376 - DNA, 16 bp, Artificial
  oligonucleotide probe
agcgcaggagacgcct

SEQ ID NO: 30377 - DNA, 16 bp, Artificial
  oligonucleotide probe
gagccgagtggcgtcc

SEQ ID NO: 30378 - DNA, 16 bp, Artificial
  oligonucleotide probe
gagccgagtggcgtcc

SEQ ID NO: 30379 - DNA, 16 bp, Artificial
  oligonucleotide probe
cggatgctgcgagcag

SEQ ID NO: 30380 - DNA, 16 bp, Artificial
  oligonucleotide probe
cggatgctgcgagcag

SEQ ID NO: 30381 - DNA, 16 bp, Artificial
  oligonucleotide probe
cggatgctgcgagcag

SEQ ID NO: 30382 - DNA, 16 bp, Artificial
  oligonucleotide probe
cggatgctgcgagcag

SEQ ID NO: 30383 - DNA, 16 bp, Artificial
  oligonucleotide probe
tcaccggagccttggc

SEQ ID NO: 30384 - DNA, 16 bp, Artificial
  oligonucleotide probe
tcaccggagccttggc

SEQ ID NO: 30385 - DNA, 16 bp, Artificial
  oligonucleotide probe
cggagacgcagggggt

SEQ ID NO: 30386 - DNA, 16 bp, Artificial
  oligonucleotide probe
cggagacgcagggggt

SEQ ID NO: 30387 - DNA, 16 bp, Artificial
  oligonucleotide probe
tcaccggagccttggc

SEQ ID NO: 30388 - DNA, 16 bp, Artificial
  oligonucleotide probe
tcaccggagccttggc

SEQ ID NO: 30389 - DNA, 16 bp, Artificial
  oligonucleotide probe
gcgacacccggaacgc

SEQ ID NO: 30390 - DNA, 16 bp, Artificial
  oligonucleotide probe
gcgacacccggaacgc

SEQ ID NO: 30391 - DNA, 16 bp, Artificial
  oligonucleotide probe
cggatgctgcgagcag

SEQ ID NO: 30392 - DNA, 16 bp, Artificial
  oligonucleotide probe
cggatgctgcgagcag

SEQ ID NO: 30393 - DNA, 16 bp, Artificial
  oligonucleotide probe
agcgcaggagacgcct

SEQ ID NO: 30394 - DNA, 16 bp, Artificial
  oligonucleotide probe
agcgcaggagacgcct

SEQ ID NO: 30395 - DNA, 16 bp, Artificial
  oligonucleotide probe
gtccgcaggtccgcct

SEQ ID NO: 30396 - DNA, 16 bp, Artificial
  oligonucleotide probe
gtccgcaggtccgcct

SEQ ID NO: 30397 - DNA, 16 bp, Artificial
  oligonucleotide probe
gagccgagtggcgtcc

SEQ ID NO: 30398 - DNA, 16 bp, Artificial
  oligonucleotide probe
gagccgagtggcgtcc

SEQ ID NO: 30399 - DNA, 16 bp, Artificial
  oligonucleotide probe
gcagcgagcgagggaa

SEQ ID NO: 30400 - DNA, 16 bp, Artificial
  oligonucleotide probe
gcagcgagcgagggaa

SEQ ID NO: 30401 - DNA, 16 bp, Artificial
  oligonucleotide probe
gacgagcgcaccgcag

SEQ ID NO: 30402 - DNA, 16 bp, Artificial
  oligonucleotide probe
gacgagcgcaccgcag

SEQ ID NO: 30403 - DNA, 16 bp, Artificial
  oligonucleotide probe
gtccgcaggtccgcct

SEQ ID NO: 30404 - DNA, 16 bp, Artificial
  oligonucleotide probe
gtccgcaggtccgcct

SEQ ID NO: 30405 - DNA, 16 bp, Artificial
  oligonucleotide probe
cggatgctgcgagcag

SEQ ID NO: 30406 - DNA, 16 bp, Artificial
  oligonucleotide probe
cggatgctgcgagcag

SEQ ID NO: 30407 - DNA, 16 bp, Artificial
  oligonucleotide probe
gcagcgagcgagggaa

SEQ ID NO: 30408 - DNA, 16 bp, Artificial
  oligonucleotide probe
gcagcgagcgagggaa

SEQ ID NO: 30409 - DNA, 16 bp, Artificial
  oligonucleotide probe
ggtcgagctggcgcag

SEQ ID NO: 30410 - DNA, 16 bp, Artificial
  oligonucleotide probe
ggtcgagctggcgcag

SEQ ID NO: 30411 - DNA, 16 bp, Artificial
  oligonucleotide probe
gagcgggtgtggagcg

SEQ ID NO: 30412 - DNA, 16 bp, Artificial
  oligonucleotide probe
gagcgggtgtggagcg

SEQ ID NO: 30413 - DNA, 16 bp, Artificial
  oligonucleotide probe
gtccccaaagcggcag

SEQ ID NO: 30414 - DNA, 16 bp, Artificial
  oligonucleotide probe
gtccccaaagcggcag

SEQ ID NO: 30415 - DNA, 16 bp, Artificial
  oligonucleotide probe
gtccgcaggtccgcct

SEQ ID NO: 30416 - DNA, 16 bp, Artificial
  oligonucleotide probe
gtccgcaggtccgcct

SEQ ID NO: 30417 - DNA, 16 bp, Artificial
  oligonucleotide probe
gagccgagtggcgtcc

SEQ ID NO: 30418 - DNA, 16 bp, Artificial
  oligonucleotide probe
gagccgagtggcgtcc

SEQ ID NO: 30419 - DNA, 16 bp, Artificial
  oligonucleotide probe
agcgcctcgacgggaa

SEQ ID NO: 30420 - DNA, 16 bp, Artificial
  oligonucleotide probe
agcgcctcgacgggaa

SEQ ID NO: 30421 - DNA, 16 bp, Artificial
  oligonucleotide probe
agcgcctcgacgggaa

SEQ ID NO: 30422 - DNA, 16 bp, Artificial
  oligonucleotide probe
agcgcctcgacgggaa

SEQ ID NO: 30423 - DNA, 16 bp, Artificial
  oligonucleotide probe
cggagacgcagggggt

SEQ ID NO: 30424 - DNA, 16 bp, Artificial
  oligonucleotide probe
cggagacgcagggggt

SEQ ID NO: 30425 - DNA, 16 bp, Artificial
  oligonucleotide probe
agcgcctcgacgggaa

SEQ ID NO: 30426 - DNA, 16 bp, Artificial
  oligonucleotide probe
agcgcctcgacgggaa

SEQ ID NO: 30427 - DNA, 16 bp, Artificial
  oligonucleotide probe
gagcgggtgtggagcg

SEQ ID NO: 30428 - DNA, 16 bp, Artificial
  oligonucleotide probe
gagcgggtgtggagcg

SEQ ID NO: 30429 - DNA, 16 bp, Artificial
  oligonucleotide probe
gtccgcaggtccgcct

SEQ ID NO: 30430 - DNA, 16 bp, Artificial
  oligonucleotide probe
gtccgcaggtccgcct

SEQ ID NO: 30431 - DNA, 16 bp, Artificial
  oligonucleotide probe
cggatgctgcgagcag

SEQ ID NO: 30432 - DNA, 16 bp, Artificial
  oligonucleotide probe
cggatgctgcgagcag

SEQ ID NO: 30433 - DNA, 16 bp, Artificial
  oligonucleotide probe
cggatgctgcgagcag

SEQ ID NO: 30434 - DNA, 16 bp, Artificial
  oligonucleotide probe
cggatgctgcgagcag

SEQ ID NO: 30435 - DNA, 16 bp, Artificial
  oligonucleotide probe
gtgggcctcctcccaa

SEQ ID NO: 30436 - DNA, 16 bp, Artificial
  oligonucleotide probe
gtgggcctcctcccaa

SEQ ID NO: 30437 - DNA, 16 bp, Artificial
  oligonucleotide probe
gagcgggtgtggagcg

SEQ ID NO: 30438 - DNA, 16 bp, Artificial
  oligonucleotide probe
gagcgggtgtggagcg

SEQ ID NO: 30439 - DNA, 16 bp, Artificial
  oligonucleotide probe
gcgaacgccctccagg

SEQ ID NO: 30440 - DNA, 16 bp, Artificial
  oligonucleotide probe
gcgaacgccctccagg

SEQ ID NO: 30441 - DNA, 16 bp, Artificial
  oligonucleotide probe
tcaccggagccttggc

SEQ ID NO: 30442 - DNA, 16 bp, Artificial
  oligonucleotide probe
tcaccggagccttggc

SEQ ID NO: 30443 - DNA, 16 bp, Artificial
  oligonucleotide probe
gagccgagtggcgtcc

SEQ ID NO: 30444 - DNA, 16 bp, Artificial
  oligonucleotide probe
gagccgagtggcgtcc

SEQ ID NO: 30445 - DNA, 16 bp, Artificial
  oligonucleotide probe
gtccgcaggtccgcct

SEQ ID NO: 30446 - DNA, 16 bp, Artificial
  oligonucleotide probe
gtccgcaggtccgcct

SEQ ID NO: 30447 - DNA, 16 bp, Artificial
  oligonucleotide probe
agcgcaggagacgcct

SEQ ID NO: 30448 - DNA, 16 bp, Artificial
  oligonucleotide probe
agcgcaggagacgcct

SEQ ID NO: 30449 - DNA, 16 bp, Artificial
  oligonucleotide probe
gcgaacgccctccagg

SEQ ID NO: 30450 - DNA, 16 bp, Artificial
  oligonucleotide probe
gcgaacgccctccagg

SEQ ID NO: 30451 - DNA, 16 bp, Artificial
  oligonucleotide probe
agcgcctcgacgggaa

SEQ ID NO: 30452 - DNA, 16 bp, Artificial
  oligonucleotide probe
agcgcctcgacgggaa

SEQ ID NO: 30453 - DNA, 16 bp, Artificial
  oligonucleotide probe
cggatgctgcgagcag

SEQ ID NO: 30454 - DNA, 16 bp, Artificial
  oligonucleotide probe
cggatgctgcgagcag

SEQ ID NO: 30455 - DNA, 16 bp, Artificial
  oligonucleotide probe
cggagacgcagggggt

SEQ ID NO: 30456 - DNA, 16 bp, Artificial
  oligonucleotide probe
cggagacgcagggggt

SEQ ID NO: 30457 - DNA, 16 bp, Artificial
  oligonucleotide probe
acgctgctgcgaacca

SEQ ID NO: 30458 - DNA, 16 bp, Artificial
  oligonucleotide probe
acgctgctgcgaacca

SEQ ID NO: 30459 - DNA, 16 bp, Artificial
  oligonucleotide probe
gcagcgagcgagggaa

SEQ ID NO: 30460 - DNA, 16 bp, Artificial
  oligonucleotide probe
agcgcctcgacgggaa

SEQ ID NO: 30461 - DNA, 16 bp, Artificial
  oligonucleotide probe
gcgacacccggaacgc

SEQ ID NO: 30462 - DNA, 16 bp, Artificial
  oligonucleotide probe
gagccgagtggcgtcc

SEQ ID NO: 30463 - DNA, 32 bp, Artificial; identical to SEQ ID NO: 7673
  oligonucleotide probe

SEQ ID NO: 30464 - DNA, 32 bp, Artificial; identical to SEQ ID NO: 7673
  oligonucleotide probe

SEQ ID NO: 30465 - DNA, 32 bp, Artificial; identical to SEQ ID NO: 5171
  oligonucleotide probe

SEQ ID NO: 30466 - DNA, 32 bp, Artificial; identical to SEQ ID NO: 5171
  oligonucleotide probe

SEQ ID NO: 30467 - DNA, 32 bp, Artificial; identical to SEQ ID NO: 7655
  oligonucleotide probe

SEQ ID NO: 30468 - DNA, 32 bp, Artificial; identical to SEQ ID NO: 7655
  oligonucleotide probe

SEQ ID NO: 30469 - DNA, 32 bp, Artificial; identical to SEQ ID NO: 7690
  oligonucleotide probe

SEQ ID NO: 30470 - DNA, 32 bp, Artificial; identical to SEQ ID NO: 7690
  oligonucleotide probe

SEQ ID NO: 30471 - DNA, 32 bp, Artificial; identical to SEQ ID NO: 5171
  oligonucleotide probe

SEQ ID NO: 30472 - DNA, 32 bp, Artificial; identical to SEQ ID NO: 5171
  oligonucleotide probe

SEQ ID NO: 30473 - DNA, 32 bp, Artificial; identical to SEQ ID NO: 7623
  oligonucleotide probe

SEQ ID NO: 30474 - DNA, 32 bp, Artificial; identical to SEQ ID NO: 7623
  oligonucleotide probe

SEQ ID NO: 30475 - DNA, 32 bp, Artificial; identical to SEQ ID NO: 7673
  oligonucleotide probe

SEQ ID NO: 30476 - DNA, 32 bp, Artificial; identical to SEQ ID NO: 7673
  oligonucleotide probe

SEQ ID NO: 30477 - DNA, 32 bp, Artificial; identical to SEQ ID NO: 7690
  oligonucleotide probe

SEQ ID NO: 30478 - DNA, 32 bp, Artificial; identical to SEQ ID NO: 7690
  oligonucleotide probe

SEQ ID NO: 30479 - DNA, 32 bp, Artificial; identical to SEQ ID NO: 5163
  oligonucleotide probe

SEQ ID NO: 30480 - DNA, 32 bp, Artificial; identical to SEQ ID NO: 5163
  oligonucleotide probe

SEQ ID NO: 30481 - DNA, 32 bp, Artificial; identical to SEQ ID NO: 5163
  oligonucleotide probe

SEQ ID NO: 30482 - DNA, 32 bp, Artificial; identical to SEQ ID NO: 5163
  oligonucleotide probe

SEQ ID NO: 30483 - DNA, 32 bp, Artificial; identical to SEQ ID NO: 7676
  oligonucleotide probe

SEQ ID NO: 30484 - DNA, 32 bp, Artificial; identical to SEQ ID NO: 7676
  oligonucleotide probe

SEQ ID NO: 30485 - DNA, 32 bp, Artificial; identical to SEQ ID NO: 5185
  oligonucleotide probe

SEQ ID NO: 30486 - DNA, 32 bp, Artificial; identical to SEQ ID NO: 5185
  oligonucleotide probe

SEQ ID NO: 30487 - DNA, 32 bp, Artificial; identical to SEQ ID NO: 7690
  oligonucleotide probe

SEQ ID NO: 30488 - DNA, 32 bp, Artificial; identical to SEQ ID NO: 7690
  oligonucleotide probe

SEQ ID NO: 30489 - DNA, 32 bp, Artificial; identical to SEQ ID NO: 5163
  oligonucleotide probe

SEQ ID NO: 30490 - DNA, 32 bp, Artificial; identical to SEQ ID NO: 5163
  oligonucleotide probe

SEQ ID NO: 30491 - DNA, 32 bp, Artificial; identical to SEQ ID NO: 5171
  oligonucleotide probe

SEQ ID NO: 30492 - DNA, 32 bp, Artificial; identical to SEQ ID NO: 5171
  oligonucleotide probe

SEQ ID NO: 30493 - DNA, 32 bp, Artificial; identical to SEQ ID NO: 7676
  oligonucleotide probe

SEQ ID NO: 30494 - DNA, 32 bp, Artificial; identical to SEQ ID NO: 7676
  oligonucleotide probe

SEQ ID NO: 30495 - DNA, 32 bp, Artificial; identical to SEQ ID NO: 7662
  oligonucleotide probe

SEQ ID NO: 30496 - DNA, 32 bp, Artificial; identical to SEQ ID NO: 7662
  oligonucleotide probe

SEQ ID NO: 30497 - DNA, 32 bp, Artificial; identical to SEQ ID NO: 5185
  oligonucleotide probe

SEQ ID NO: 30498 - DNA, 32 bp, Artificial; identical to SEQ ID NO: 5185
  oligonucleotide probe

SEQ ID NO: 30499 - DNA, 32 bp, Artificial; identical to SEQ ID NO: 7676
  oligonucleotide probe

SEQ ID NO: 30500 - DNA, 32 bp, Artificial; identical to SEQ ID NO: 7676
  oligonucleotide probe

SEQ ID NO: 30501 - DNA, 32 bp, Artificial; identical to SEQ ID NO: 7673
  oligonucleotide probe

SEQ ID NO: 30502 - DNA, 32 bp, Artificial; identical to SEQ ID NO: 7673
  oligonucleotide probe

SEQ ID NO: 30503 - DNA, 32 bp, Artificial; identical to SEQ ID NO: 5171
  oligonucleotide probe

SEQ ID NO: 30504 - DNA, 32 bp, Artificial; identical to SEQ ID NO: 5171
  oligonucleotide probe

SEQ ID NO: 30505 - DNA, 32 bp, Artificial; identical to SEQ ID NO: 7673
  oligonucleotide probe

SEQ ID NO: 30506 - DNA, 32 bp, Artificial; identical to SEQ ID NO: 7673
  oligonucleotide probe

SEQ ID NO: 30507 - DNA, 32 bp, Artificial; identical to SEQ ID NO: 7676
  oligonucleotide probe

SEQ ID NO: 30508 - DNA, 32 bp, Artificial; identical to SEQ ID NO: 7676
  oligonucleotide probe

SEQ ID NO: 30509 - DNA, 32 bp, Artificial; identical to SEQ ID NO: 7644
  oligonucleotide probe

SEQ ID NO: 30510 - DNA, 32 bp, Artificial; identical to SEQ ID NO: 7644
  oligonucleotide probe

SEQ ID NO: 30511 - DNA, 32 bp, Artificial; identical to SEQ ID NO: 5171
  oligonucleotide probe

SEQ ID NO: 30512 - DNA, 32 bp, Artificial; identical to SEQ ID NO: 5171
  oligonucleotide probe

SEQ ID NO: 30513 - DNA, 32 bp, Artificial; identical to SEQ ID NO: 5171
  oligonucleotide probe

SEQ ID NO: 30514 - DNA, 32 bp, Artificial; identical to SEQ ID NO: 5171
  oligonucleotide probe

SEQ ID NO: 30515 - DNA, 32 bp, Artificial; identical to SEQ ID NO: 5185
  oligonucleotide probe

SEQ ID NO: 30516 - DNA, 32 bp, Artificial; identical to SEQ ID NO: 5185
  oligonucleotide probe

SEQ ID NO: 30517 - DNA, 32 bp, Artificial; identical to SEQ ID NO: 5171
  oligonucleotide probe

SEQ ID NO: 30518 - DNA, 32 bp, Artificial; identical to SEQ ID NO: 5171
  oligonucleotide probe

SEQ ID NO: 30519 - DNA, 32 bp, Artificial; identical to SEQ ID NO: 7676
  oligonucleotide probe

SEQ ID NO: 30520 - DNA, 32 bp, Artificial; identical to SEQ ID NO: 7676
  oligonucleotide probe

SEQ ID NO: 30521 - DNA, 32 bp, Artificial; identical to SEQ ID NO: 7673
  oligonucleotide probe

SEQ ID NO: 30522 - DNA, 32 bp, Artificial; identical to SEQ ID NO: 7673
  oligonucleotide probe

SEQ ID NO: 30523 - DNA, 32 bp, Artificial; identical to SEQ ID NO: 7644
  oligonucleotide probe

SEQ ID NO: 30524 - DNA, 32 bp, Artificial; identical to SEQ ID NO: 7624
  oligonucleotide probe

SEQ ID NO: 30525 - DNA, 32 bp, Artificial; identical to SEQ ID NO: 7655
  oligonucleotide probe

SEQ ID NO: 30526 - DNA, 32 bp, Artificial; identical to SEQ ID NO: 7623
  oligonucleotide probe

SEQ ID NO: 30527 - DNA, 32 bp, Artificial; identical to SEQ ID NO: 5159
  oligonucleotide probe

SEQ ID NO: 30528 - DNA, 32 bp, Artificial; identical to SEQ ID NO: 5141
  oligonucleotide probe

SEQ ID NO: 30529 - DNA, 32 bp, Artificial; identical to SEQ ID NO: 7659
  oligonucleotide probe

SEQ ID NO: 30530 - DNA, 32 bp, Artificial; identical to SEQ ID NO: 5171
  oligonucleotide probe

SEQ ID NO: 30531 - DNA, 32 bp, Artificial; identical to SEQ ID NO: 5133
  oligonucleotide probe

SEQ ID NO: 30532 - DNA, 32 bp, Artificial; identical to SEQ ID NO: 7662
  oligonucleotide probe

SEQ ID NO: 30533 - DNA, 32 bp, Artificial; identical to SEQ ID NO: 11163
  oligonucleotide probe

SEQ ID NO: 30534 - DNA, 32 bp, Artificial; identical to SEQ ID NO: 11163
  oligonucleotide probe

SEQ ID NO: 30535 - DNA, 32 bp, Artificial; identical to SEQ ID NO: 11165
  oligonucleotide probe

SEQ ID NO: 30536 - DNA, 32 bp, Artificial; identical to SEQ ID NO: 11165
  oligonucleotide probe

SEQ ID NO: 30537 - DNA, 32 bp, Artificial; identical to SEQ ID NO: 11167
  oligonucleotide probe

SEQ ID NO: 30538 - DNA, 32 bp, Artificial; identical to SEQ ID NO: 11167
  oligonucleotide probe

SEQ ID NO: 30539 - DNA, 32 bp, Artificial; identical to SEQ ID NO: 11163
  oligonucleotide probe

SEQ ID NO: 30540 - DNA, 32 bp, Artificial; identical to SEQ ID NO: 11163
  oligonucleotide probe

SEQ ID NO: 30541 - DNA, 32 bp, Artificial; identical to SEQ ID NO: 11171
  oligonucleotide probe

SEQ ID NO: 30542 - DNA, 32 bp, Artificial; identical to SEQ ID NO: 11171
  oligonucleotide probe

SEQ ID NO: 30543 - DNA, 32 bp, Artificial; identical to SEQ ID NO: 11173
  oligonucleotide probe

SEQ ID NO: 30544 - DNA, 32 bp, Artificial; identical to SEQ ID NO: 11173
  oligonucleotide probe

SEQ ID NO: 30545 - DNA, 32 bp, Artificial; identical to SEQ ID NO: 11163
  oligonucleotide probe

SEQ ID NO: 30546 - DNA, 32 bp, Artificial; identical to SEQ ID NO: 11163
  oligonucleotide probe

SEQ ID NO: 30547 - DNA, 32 bp, Artificial; identical to SEQ ID NO: 11177
  oligonucleotide probe

SEQ ID NO: 30548 - DNA, 32 bp, Artificial; identical to SEQ ID NO: 11177
  oligonucleotide probe

SEQ ID NO: 30549 - DNA, 32 bp, Artificial; identical to SEQ ID NO: 11165
  oligonucleotide probe

SEQ ID NO: 30550 - DNA, 32 bp, Artificial; identical to SEQ ID NO: 11165
  oligonucleotide probe

SEQ ID NO: 30551 - DNA, 32 bp, Artificial; identical to SEQ ID NO: 11181
  oligonucleotide probe

SEQ ID NO: 30552 - DNA, 32 bp, Artificial; identical to SEQ ID NO: 11181
  oligonucleotide probe

SEQ ID NO: 30553 - DNA, 32 bp, Artificial; identical to SEQ ID NO: 11165
  oligonucleotide probe

SEQ ID NO: 30554 - DNA, 32 bp, Artificial; identical to SEQ ID NO: 11165
  oligonucleotide probe

SEQ ID NO: 30555 - DNA, 32 bp, Artificial; identical to SEQ ID NO: 11185
  oligonucleotide probe

SEQ ID NO: 30556 - DNA, 32 bp, Artificial; identical to SEQ ID NO: 11185
  oligonucleotide probe

SEQ ID NO: 30557 - DNA, 32 bp, Artificial; identical to SEQ ID NO: 11173
  oligonucleotide probe

SEQ ID NO: 30558 - DNA, 32 bp, Artificial; identical to SEQ ID NO: 11173
  oligonucleotide probe

SEQ ID NO: 30559 - DNA, 32 bp, Artificial; identical to SEQ ID NO: 11165
  oligonucleotide probe

SEQ ID NO: 30560 - DNA, 32 bp, Artificial; identical to SEQ ID NO: 11165
  oligonucleotide probe

SEQ ID NO: 30561 - DNA, 32 bp, Artificial; identical to SEQ ID NO: 11171
  oligonucleotide probe

SEQ ID NO: 30562 - DNA, 32 bp, Artificial; identical to SEQ ID NO: 11171
  oligonucleotide probe

SEQ ID NO: 30563 - DNA, 32 bp, Artificial; identical to SEQ ID NO: 11163
  oligonucleotide probe

SEQ ID NO: 30564 - DNA, 32 bp, Artificial; identical to SEQ ID NO: 11163
  oligonucleotide probe

SEQ ID NO: 30565 - DNA, 32 bp, Artificial; identical to SEQ ID NO: 11163
  oligonucleotide probe

SEQ ID NO: 30566 - DNA, 32 bp, Artificial; identical to SEQ ID NO: 11163
  oligonucleotide probe

SEQ ID NO: 30567 - DNA, 32 bp, Artificial; identical to SEQ ID NO: 11177
  oligonucleotide probe

SEQ ID NO: 30568 - DNA, 32 bp, Artificial; identical to SEQ ID NO: 11177
  oligonucleotide probe

SEQ ID NO: 30569 - DNA, 32 bp, Artificial; identical to SEQ ID NO: 11181
  oligonucleotide probe

SEQ ID NO: 30570 - DNA, 32 bp, Artificial; identical to SEQ ID NO: 11181
  oligonucleotide probe

SEQ ID NO: 30571 - DNA, 32 bp, Artificial; identical to SEQ ID NO: 11181
  oligonucleotide probe

SEQ ID NO: 30572 - DNA, 32 bp, Artificial; identical to SEQ ID NO: 11181
  oligonucleotide probe

SEQ ID NO: 30573 - DNA, 32 bp, Artificial; identical to SEQ ID NO: 11177
  oligonucleotide probe

SEQ ID NO: 30574 - DNA, 32 bp, Artificial; identical to SEQ ID NO: 11177
  oligonucleotide probe

SEQ ID NO: 30575 - DNA, 32 bp, Artificial; identical to SEQ ID NO: 11171
  oligonucleotide probe

SEQ ID NO: 30576 - DNA, 32 bp, Artificial; identical to SEQ ID NO: 11171
  oligonucleotide probe

SEQ ID NO: 30577 - DNA, 32 bp, Artificial; identical to SEQ ID NO: 11167
  oligonucleotide probe

SEQ ID NO: 30578 - DNA, 32 bp, Artificial; identical to SEQ ID NO: 11167
  oligonucleotide probe

SEQ ID NO: 30579 - DNA, 32 bp, Artificial; identical to SEQ ID NO: 11167
  oligonucleotide probe

SEQ ID NO: 30580 - DNA, 32 bp, Artificial; identical to SEQ ID NO: 11167
  oligonucleotide probe

SEQ ID NO: 30581 - DNA, 32 bp, Artificial; identical to SEQ ID NO: 11177
  oligonucleotide probe

SEQ ID NO: 30582 - DNA, 32 bp, Artificial; identical to SEQ ID NO: 11177
  oligonucleotide probe

SEQ ID NO: 30583 - DNA, 32 bp, Artificial; identical to SEQ ID NO: 11177
  oligonucleotide probe

SEQ ID NO: 30584 - DNA, 32 bp, Artificial; identical to SEQ ID NO: 11177
  oligonucleotide probe

SEQ ID NO: 30585 - DNA, 32 bp, Artificial; identical to SEQ ID NO: 11165
  oligonucleotide probe

SEQ ID NO: 30586 - DNA, 32 bp, Artificial; identical to SEQ ID NO: 11165
  oligonucleotide probe

SEQ ID NO: 30587 - DNA, 32 bp, Artificial; identical to SEQ ID NO: 11163
  oligonucleotide probe

SEQ ID NO: 30588 - DNA, 32 bp, Artificial; identical to SEQ ID NO: 11163
  oligonucleotide probe

SEQ ID NO: 30589 - DNA, 32 bp, Artificial; identical to SEQ ID NO: 11173
  oligonucleotide probe

SEQ ID NO: 30590 - DNA, 32 bp, Artificial; identical to SEQ ID NO: 11173
  oligonucleotide probe

SEQ ID NO: 30591 - DNA, 32 bp, Artificial; identical to SEQ ID NO: 11177
  oligonucleotide probe

SEQ ID NO: 30592 - DNA, 32 bp, Artificial; identical to SEQ ID NO: 11177
  oligonucleotide probe

SEQ ID NO: 30593 - DNA, 32 bp, Artificial; identical to SEQ ID NO: 11181
  oligonucleotide probe

SEQ ID NO: 30594 - DNA, 32 bp, Artificial; identical to SEQ ID NO: 11181
  oligonucleotide probe

SEQ ID NO: 30595 - DNA, 32 bp, Artificial; identical to SEQ ID NO: 11185
  oligonucleotide probe

SEQ ID NO: 30596 - DNA, 32 bp, Artificial; identical to SEQ ID NO: 11185
  oligonucleotide probe

SEQ ID NO: 30597 - DNA, 32 bp, Artificial; identical to SEQ ID NO: 11171
  oligonucleotide probe

SEQ ID NO: 30598 - DNA, 32 bp, Artificial; identical to SEQ ID NO: 11171
  oligonucleotide probe

SEQ ID NO: 30599 - DNA, 32 bp, Artificial; identical to SEQ ID NO: 11177
  oligonucleotide probe

SEQ ID NO: 30600 - DNA, 32 bp, Artificial; identical to SEQ ID NO: 11177
  oligonucleotide probe

SEQ ID NO: 30601 - DNA, 32 bp, Artificial; identical to SEQ ID NO: 11167
  oligonucleotide probe

SEQ ID NO: 30602 - DNA, 32 bp, Artificial; identical to SEQ ID NO: 11167
  oligonucleotide probe

SEQ ID NO: 30603 - DNA, 32 bp, Artificial; identical to SEQ ID NO: 11181
  oligonucleotide probe

SEQ ID NO: 30604 - DNA, 32 bp, Artificial; identical to SEQ ID NO: 11181
  oligonucleotide probe

SEQ ID NO: 30605 - DNA, 32 bp, Artificial; identical to SEQ ID NO: 11163
  oligonucleotide probe

SEQ ID NO: 30606 - DNA, 32 bp, Artificial; identical to SEQ ID NO: 11163
  oligonucleotide probe

SEQ ID NO: 30607 - DNA, 32 bp, Artificial; identical to SEQ ID NO: 11185
  oligonucleotide probe

SEQ ID NO: 30608 - DNA, 32 bp, Artificial; identical to SEQ ID NO: 11185
  oligonucleotide probe

SEQ ID NO: 30609 - DNA, 32 bp, Artificial; identical to SEQ ID NO: 11181
  oligonucleotide probe

SEQ ID NO: 30610 - DNA, 32 bp, Artificial; identical to SEQ ID NO: 11181
  oligonucleotide probe

SEQ ID NO: 30611 - DNA, 32 bp, Artificial; identical to SEQ ID NO: 11167
  oligonucleotide probe

SEQ ID NO: 30612 - DNA, 32 bp, Artificial; identical to SEQ ID NO: 11167
  oligonucleotide probe

SEQ ID NO: 30613 - DNA, 32 bp, Artificial; identical to SEQ ID NO: 11171
  oligonucleotide probe

SEQ ID NO: 30614 - DNA, 32 bp, Artificial; identical to SEQ ID NO: 11171
  oligonucleotide probe

SEQ ID NO: 30615 - DNA, 32 bp, Artificial; identical to SEQ ID NO: 11167
  oligonucleotide probe

SEQ ID NO: 30616 - DNA, 32 bp, Artificial; identical to SEQ ID NO: 11167
  oligonucleotide probe

SEQ ID NO: 30617 - DNA, 32 bp, Artificial; identical to SEQ ID NO: 11181
  oligonucleotide probe

SEQ ID NO: 30618 - DNA, 32 bp, Artificial; identical to SEQ ID NO: 11181
  oligonucleotide probe

SEQ ID NO: 30619 - DNA, 32 bp, Artificial; identical to SEQ ID NO: 11177
  oligonucleotide probe

SEQ ID NO: 30620 - DNA, 32 bp, Artificial; identical to SEQ ID NO: 11177
  oligonucleotide probe

SEQ ID NO: 30621 - DNA, 32 bp, Artificial; identical to SEQ ID NO: 11163
  oligonucleotide probe

SEQ ID NO: 30622 - DNA, 32 bp, Artificial; identical to SEQ ID NO: 11163
  oligonucleotide probe

SEQ ID NO: 30623 - DNA, 32 bp, Artificial; identical to SEQ ID NO: 11171
  oligonucleotide probe

SEQ ID NO: 30624 - DNA, 32 bp, Artificial; identical to SEQ ID NO: 11171
  oligonucleotide probe

SEQ ID NO: 30625 - DNA, 32 bp, Artificial; identical to SEQ ID NO: 11173
  oligonucleotide probe

SEQ ID NO: 30626 - DNA, 32 bp, Artificial; identical to SEQ ID NO: 11173
  oligonucleotide probe

SEQ ID NO: 30627 - DNA, 32 bp, Artificial; identical to SEQ ID NO: 11173
  oligonucleotide probe

SEQ ID NO: 30628 - DNA, 32 bp, Artificial; identical to SEQ ID NO: 11173
  oligonucleotide probe

SEQ ID NO: 30629 - DNA, 32 bp, Artificial; identical to SEQ ID NO: 11173
  oligonucleotide probe

SEQ ID NO: 30630 - DNA, 32 bp, Artificial; identical to SEQ ID NO: 11173
  oligonucleotide probe

SEQ ID NO: 30631 - DNA, 32 bp, Artificial; identical to SEQ ID NO: 11177
  oligonucleotide probe

SEQ ID NO: 30632 - DNA, 32 bp, Artificial; identical to SEQ ID NO: 11177
  oligonucleotide probe

SEQ ID NO: 30633 - DNA, 32 bp, Artificial; identical to SEQ ID NO: 11171
  oligonucleotide probe

SEQ ID NO: 30634 - DNA, 32 bp, Artificial; identical to SEQ ID NO: 11171
  oligonucleotide probe

SEQ ID NO: 30635 - DNA, 32 bp, Artificial; identical to SEQ ID NO: 11185
  oligonucleotide probe

SEQ ID NO: 30636 - DNA, 32 bp, Artificial; identical to SEQ ID NO: 11185
  oligonucleotide probe

SEQ ID NO: 30637 - DNA, 32 bp, Artificial; identical to SEQ ID NO: 11173
  oligonucleotide probe

SEQ ID NO: 30638 - DNA, 32 bp, Artificial; identical to SEQ ID NO: 11173
  oligonucleotide probe

SEQ ID NO: 30639 - DNA, 32 bp, Artificial; identical to SEQ ID NO: 11181
  oligonucleotide probe

SEQ ID NO: 30640 - DNA, 32 bp, Artificial; identical to SEQ ID NO: 11181
  oligonucleotide probe

SEQ ID NO: 30641 - DNA, 32 bp, Artificial; identical to SEQ ID NO: 11185
  oligonucleotide probe

SEQ ID NO: 30642 - DNA, 32 bp, Artificial; identical to SEQ ID NO: 11185
  oligonucleotide probe

SEQ ID NO: 30643 - DNA, 32 bp, Artificial; identical to SEQ ID NO: 11165
  oligonucleotide probe

SEQ ID NO: 30644 - DNA, 32 bp, Artificial; identical to SEQ ID NO: 11165
  oligonucleotide probe

SEQ ID NO: 30645 - DNA, 32 bp, Artificial; identical to SEQ ID NO: 11167
  oligonucleotide probe

SEQ ID NO: 30646 - DNA, 32 bp, Artificial; identical to SEQ ID NO: 11167
  oligonucleotide probe

SEQ ID NO: 30647 - DNA, 32 bp, Artificial; identical to SEQ ID NO: 11185
  oligonucleotide probe

SEQ ID NO: 30648 - DNA, 32 bp, Artificial; identical to SEQ ID NO: 11185
  oligonucleotide probe

SEQ ID NO: 30649 - DNA, 32 bp, Artificial; identical to SEQ ID NO: 11171
  oligonucleotide probe

SEQ ID NO: 30650 - DNA, 32 bp, Artificial; identical to SEQ ID NO: 11171
  oligonucleotide probe

SEQ ID NO: 30651 - DNA, 32 bp, Artificial; identical to SEQ ID NO: 11167
  oligonucleotide probe

SEQ ID NO: 30652 - DNA, 32 bp, Artificial; identical to SEQ ID NO: 11167
  oligonucleotide probe

SEQ ID NO: 30653 - DNA, 32 bp, Artificial; identical to SEQ ID NO: 11163
  oligonucleotide probe

SEQ ID NO: 30654 - DNA, 32 bp, Artificial; identical to SEQ ID NO: 11163
  oligonucleotide probe

SEQ ID NO: 30655 - DNA, 32 bp, Artificial; identical to SEQ ID NO: 11173
  oligonucleotide probe

SEQ ID NO: 30656 - DNA, 32 bp, Artificial; identical to SEQ ID NO: 11173
  oligonucleotide probe

SEQ ID NO: 30657 - DNA, 32 bp, Artificial; identical to SEQ ID NO: 11185
  oligonucleotide probe

SEQ ID NO: 30658 - DNA, 32 bp, Artificial; identical to SEQ ID NO: 11185
  oligonucleotide probe

SEQ ID NO: 30659 - DNA, 32 bp, Artificial; identical to SEQ ID NO: 11167
  oligonucleotide probe

SEQ ID NO: 30660 - DNA, 32 bp, Artificial; identical to SEQ ID NO: 11167
  oligonucleotide probe

SEQ ID NO: 30661 - DNA, 32 bp, Artificial; identical to SEQ ID NO: 11185
  oligonucleotide probe

SEQ ID NO: 30662 - DNA, 32 bp, Artificial; identical to SEQ ID NO: 11185
  oligonucleotide probe

SEQ ID NO: 30663 - DNA, 32 bp, Artificial; identical to SEQ ID NO: 11185
  oligonucleotide probe

SEQ ID NO: 30664 - DNA, 32 bp, Artificial; identical to SEQ ID NO: 11185
  oligonucleotide probe

SEQ ID NO: 30665 - DNA, 32 bp, Artificial; identical to SEQ ID NO: 11181
  oligonucleotide probe

SEQ ID NO: 30666 - DNA, 32 bp, Artificial; identical to SEQ ID NO: 11181
  oligonucleotide probe

SEQ ID NO: 30667 - DNA, 32 bp, Artificial; identical to SEQ ID NO: 11177
  oligonucleotide probe

SEQ ID NO: 30668 - DNA, 32 bp, Artificial; identical to SEQ ID NO: 11177
  oligonucleotide probe

SEQ ID NO: 30669 - DNA, 32 bp, Artificial; identical to SEQ ID NO: 11173
  oligonucleotide probe

SEQ ID NO: 30670 - DNA, 32 bp, Artificial; identical to SEQ ID NO: 11173
  oligonucleotide probe

SEQ ID NO: 30671 - DNA, 32 bp, Artificial; identical to SEQ ID NO: 11181
  oligonucleotide probe

SEQ ID NO: 30672 - DNA, 32 bp, Artificial; identical to SEQ ID NO: 11181
  oligonucleotide probe

SEQ ID NO: 30673 - DNA, 32 bp, Artificial; identical to SEQ ID NO: 11165
  oligonucleotide probe

SEQ ID NO: 30674 - DNA, 32 bp, Artificial; identical to SEQ ID NO: 11165
  oligonucleotide probe

SEQ ID NO: 30675 - DNA, 32 bp, Artificial; identical to SEQ ID NO: 11173
  oligonucleotide probe

SEQ ID NO: 30676 - DNA, 32 bp, Artificial; identical to SEQ ID NO: 11173
  oligonucleotide probe

SEQ ID NO: 30677 - DNA, 32 bp, Artificial; identical to SEQ ID NO: 11185
  oligonucleotide probe

SEQ ID NO: 30678 - DNA, 32 bp, Artificial; identical to SEQ ID NO: 11185
  oligonucleotide probe

SEQ ID NO: 30679 - DNA, 32 bp, Artificial; identical to SEQ ID NO: 11167
  oligonucleotide probe

SEQ ID NO: 30680 - DNA, 32 bp, Artificial; identical to SEQ ID NO: 11167
  oligonucleotide probe

SEQ ID NO: 30681 - DNA, 32 bp, Artificial; identical to SEQ ID NO: 11165
  oligonucleotide probe

SEQ ID NO: 30682 - DNA, 32 bp, Artificial; identical to SEQ ID NO: 11165
  oligonucleotide probe

SEQ ID NO: 30683 - DNA, 32 bp, Artificial; identical to SEQ ID NO: 11165
  oligonucleotide probe

SEQ ID NO: 30684 - DNA, 32 bp, Artificial; identical to SEQ ID NO: 11165
  oligonucleotide probe

SEQ ID NO: 30685 - DNA, 32 bp, Artificial; identical to SEQ ID NO: 11163
  oligonucleotide probe

SEQ ID NO: 30686 - DNA, 32 bp, Artificial; identical to SEQ ID NO: 11163
  oligonucleotide probe

SEQ ID NO: 30687 - DNA, 32 bp, Artificial; identical to SEQ ID NO: 11171
  oligonucleotide probe

SEQ ID NO: 30688 - DNA, 32 bp, Artificial; identical to SEQ ID NO: 11171
  oligonucleotide probe

SEQ ID NO: 30689 - DNA, 32 bp, Artificial; identical to SEQ ID NO: 11171
  oligonucleotide probe

SEQ ID NO: 30690 - DNA, 32 bp, Artificial; identical to SEQ ID NO: 11171
  oligonucleotide probe

SEQ ID NO: 30691 - DNA, 32 bp, Artificial; identical to SEQ ID NO: 11165
  oligonucleotide probe

SEQ ID NO: 30692 - DNA, 32 bp, Artificial; identical to SEQ ID NO: 11165
  oligonucleotide probe

SEQ ID NO: 30693 - DNA, 32 bp, Artificial; identical to SEQ ID NO: 11165
  oligonucleotide probe

SEQ ID NO: 30694 - DNA, 32 bp, Artificial; identical to SEQ ID NO: 11185
  oligonucleotide probe

SEQ ID NO: 30695 - DNA, 32 bp, Artificial; identical to SEQ ID NO: 11173
  oligonucleotide probe

SEQ ID NO: 30696 - DNA, 32 bp, Artificial; identical to SEQ ID NO: 11163
  oligonucleotide probe

SEQ ID NO: 30697 - DNA, 32 bp, Artificial; identical to SEQ ID NO: 11177
  oligonucleotide probe

SEQ ID NO: 30698 - DNA, 32 bp, Artificial; identical to SEQ ID NO: 11167
  oligonucleotide probe

SEQ ID NO: 30699 - DNA, 32 bp, Artificial; identical to SEQ ID NO: 11171
  oligonucleotide probe

SEQ ID NO: 30700 - DNA, 32 bp, Artificial; identical to SEQ ID NO: 11181
  oligonucleotide probe

SEQ ID NO: 30701 - DNA, 32 bp, Artificial; identical to SEQ ID NO: 7644
  oligonucleotide probe

SEQ ID NO: 30702 - DNA, 32 bp, Artificial; identical to SEQ ID NO: 7644
  oligonucleotide probe

SEQ ID NO: 30703 - DNA, 32 bp, Artificial; identical to SEQ ID NO: 5171
  oligonucleotide probe

SEQ ID NO: 30704 - DNA, 32 bp, Artificial; identical to SEQ ID NO: 5171
  oligonucleotide probe

SEQ ID NO: 30705 - DNA, 32 bp, Artificial; identical to SEQ ID NO: 7673
  oligonucleotide probe

SEQ ID NO: 30706 - DNA, 32 bp, Artificial; identical to SEQ ID NO: 7673
  oligonucleotide probe

SEQ ID NO: 30707 - DNA, 32 bp, Artificial; identical to SEQ ID NO: 5134
  oligonucleotide probe

SEQ ID NO: 30708 - DNA, 32 bp, Artificial; identical to SEQ ID NO: 5134
  oligonucleotide probe

SEQ ID NO: 30709 - DNA, 32 bp, Artificial; identical to SEQ ID NO: 7597
  oligonucleotide probe

SEQ ID NO: 30710 - DNA, 32 bp, Artificial; identical to SEQ ID NO: 7597
  oligonucleotide probe

SEQ ID NO: 30711 - DNA, 32 bp, Artificial; identical to SEQ ID NO: 7673
  oligonucleotide probe

SEQ ID NO: 30712 - DNA, 32 bp, Artificial; identical to SEQ ID NO: 7673
  oligonucleotide probe

SEQ ID NO: 30713 - DNA, 32 bp, Artificial; identical to SEQ ID NO: 7623
  oligonucleotide probe

SEQ ID NO: 30714 - DNA, 32 bp, Artificial; identical to SEQ ID NO: 7623
  oligonucleotide probe

SEQ ID NO: 30715 - DNA, 32 bp, Artificial; identical to SEQ ID NO: 5163
  oligonucleotide probe

SEQ ID NO: 30716 - DNA, 32 bp, Artificial; identical to SEQ ID NO: 5163
  oligonucleotide probe

SEQ ID NO: 30717 - DNA, 32 bp, Artificial; identical to SEQ ID NO: 7597
  oligonucleotide probe

SEQ ID NO: 30718 - DNA, 32 bp, Artificial; identical to SEQ ID NO: 7597
  oligonucleotide probe

SEQ ID NO: 30719 - DNA, 32 bp, Artificial; identical to SEQ ID NO: 7673
  oligonucleotide probe

SEQ ID NO: 30720 - DNA, 32 bp, Artificial; identical to SEQ ID NO: 7673
  oligonucleotide probe

SEQ ID NO: 30721 - DNA, 32 bp, Artificial; identical to SEQ ID NO: 7597
  oligonucleotide probe

SEQ ID NO: 30722 - DNA, 32 bp, Artificial; identical to SEQ ID NO: 7597
  oligonucleotide probe

SEQ ID NO: 30723 - DNA, 32 bp, Artificial; identical to SEQ ID NO: 7644
  oligonucleotide probe

SEQ ID NO: 30724 - DNA, 32 bp, Artificial; identical to SEQ ID NO: 7644
  oligonucleotide probe

SEQ ID NO: 30725 - DNA, 32 bp, Artificial; identical to SEQ ID NO: 7655
  oligonucleotide probe

SEQ ID NO: 30726 - DNA, 32 bp, Artificial; identical to SEQ ID NO: 7655
  oligonucleotide probe

SEQ ID NO: 30727 - DNA, 32 bp, Artificial; identical to SEQ ID NO: 7598
  oligonucleotide probe

SEQ ID NO: 30728 - DNA, 32 bp, Artificial; identical to SEQ ID NO: 7598
  oligonucleotide probe

SEQ ID NO: 30729 - DNA, 32 bp, Artificial; identical to SEQ ID NO: 5185
  oligonucleotide probe

SEQ ID NO: 30730 - DNA, 32 bp, Artificial; identical to SEQ ID NO: 5185
  oligonucleotide probe

SEQ ID NO: 30731 - DNA, 32 bp, Artificial; identical to SEQ ID NO: 7783
  oligonucleotide probe

SEQ ID NO: 30732 - DNA, 32 bp, Artificial; identical to SEQ ID NO: 7783
  oligonucleotide probe

SEQ ID NO: 30733 - DNA, 32 bp, Artificial; identical to SEQ ID NO: 7659
  oligonucleotide probe

SEQ ID NO: 30734 - DNA, 32 bp, Artificial; identical to SEQ ID NO: 7659
  oligonucleotide probe

SEQ ID NO: 30735 - DNA, 32 bp, Artificial; identical to SEQ ID NO: 7623
  oligonucleotide probe

SEQ ID NO: 30736 - DNA, 32 bp, Artificial; identical to SEQ ID NO: 7623
  oligonucleotide probe

SEQ ID NO: 30737 - DNA, 32 bp, Artificial; identical to SEQ ID NO: 5163
  oligonucleotide probe

SEQ ID NO: 30738 - DNA, 32 bp, Artificial; identical to SEQ ID NO: 5163
  oligonucleotide probe

SEQ ID NO: 30739 - DNA, 32 bp, Artificial; identical to SEQ ID NO: 5133
  oligonucleotide probe

SEQ ID NO: 30740 - DNA, 32 bp, Artificial; identical to SEQ ID NO: 5133
  oligonucleotide probe

SEQ ID NO: 30741 - DNA, 32 bp, Artificial; identical to SEQ ID NO: 7655
  oligonucleotide probe

SEQ ID NO: 30742 - DNA, 32 bp, Artificial; identical to SEQ ID NO: 7655
  oligonucleotide probe

SEQ ID NO: 30743 - DNA, 32 bp, Artificial; identical to SEQ ID NO: 7812
  oligonucleotide probe

SEQ ID NO: 30744 - DNA, 32 bp, Artificial; identical to SEQ ID NO: 7812
  oligonucleotide probe

SEQ ID NO: 30745 - DNA, 32 bp, Artificial; identical to SEQ ID NO: 5136
  oligonucleotide probe

SEQ ID NO: 30746 - DNA, 32 bp, Artificial; identical to SEQ ID NO: 5136
  oligonucleotide probe

SEQ ID NO: 30747 - DNA, 32 bp, Artificial; identical to SEQ ID NO: 7594
  oligonucleotide probe

SEQ ID NO: 30748 - DNA, 32 bp, Artificial; identical to SEQ ID NO: 7594
  oligonucleotide probe

SEQ ID NO: 30749 - DNA, 32 bp, Artificial; identical to SEQ ID NO: 5133
  oligonucleotide probe

SEQ ID NO: 30750 - DNA, 32 bp, Artificial; identical to SEQ ID NO: 5133
  oligonucleotide probe

SEQ ID NO: 30751 - DNA, 32 bp, Artificial; identical to SEQ ID NO: 5163
  oligonucleotide probe

SEQ ID NO: 30752 - DNA, 32 bp, Artificial; identical to SEQ ID NO: 5163
  oligonucleotide probe

SEQ ID NO: 30753 - DNA, 32 bp, Artificial; identical to SEQ ID NO: 7676
  oligonucleotide probe

SEQ ID NO: 30754 - DNA, 32 bp, Artificial; identical to SEQ ID NO: 7676
  oligonucleotide probe

SEQ ID NO: 30755 - DNA, 32 bp, Artificial; identical to SEQ ID NO: 5171
  oligonucleotide probe

SEQ ID NO: 30756 - DNA, 32 bp, Artificial; identical to SEQ ID NO: 5171
  oligonucleotide probe

SEQ ID NO: 30757 - DNA, 32 bp, Artificial; identical to SEQ ID NO: 5185
  oligonucleotide probe

SEQ ID NO: 30758 - DNA, 32 bp, Artificial; identical to SEQ ID NO: 5185
  oligonucleotide probe

SEQ ID NO: 30759 - DNA, 32 bp, Artificial; identical to SEQ ID NO: 7676
  oligonucleotide probe

SEQ ID NO: 30760 - DNA, 32 bp, Artificial; identical to SEQ ID NO: 7676
  oligonucleotide probe

SEQ ID NO: 30761 - DNA, 32 bp, Artificial; identical to SEQ ID NO: 7644
  oligonucleotide probe

SEQ ID NO: 30762 - DNA, 32 bp, Artificial; identical to SEQ ID NO: 7644
  oligonucleotide probe

SEQ ID NO: 30763 - DNA, 32 bp, Artificial; identical to SEQ ID NO: 5171
  oligonucleotide probe

SEQ ID NO: 30764 - DNA, 32 bp, Artificial; identical to SEQ ID NO: 5171
  oligonucleotide probe

SEQ ID NO: 30765 - DNA, 32 bp, Artificial; identical to SEQ ID NO: 7863
  oligonucleotide probe

SEQ ID NO: 30766 - DNA, 32 bp, Artificial; identical to SEQ ID NO: 7863
  oligonucleotide probe

SEQ ID NO: 30767 - DNA, 32 bp, Artificial; identical to SEQ ID NO: 7594
  oligonucleotide probe

SEQ ID NO: 30768 - DNA, 32 bp, Artificial; identical to SEQ ID NO: 7594
  oligonucleotide probe

SEQ ID NO: 30769 - DNA, 32 bp, Artificial; identical to SEQ ID NO: 7673
  oligonucleotide probe

SEQ ID NO: 30770 - DNA, 32 bp, Artificial; identical to SEQ ID NO: 7673
  oligonucleotide probe

SEQ ID NO: 30771 - DNA, 32 bp, Artificial; identical to SEQ ID NO: 7673
  oligonucleotide probe

SEQ ID NO: 30772 - DNA, 32 bp, Artificial; identical to SEQ ID NO: 7673
  oligonucleotide probe

SEQ ID NO: 30773 - DNA, 32 bp, Artificial; identical to SEQ ID NO: 5160
  oligonucleotide probe

SEQ ID NO: 30774 - DNA, 32 bp, Artificial; identical to SEQ ID NO: 5160
  oligonucleotide probe

SEQ ID NO: 30775 - DNA, 32 bp, Artificial; identical to SEQ ID NO: 7676
  oligonucleotide probe

SEQ ID NO: 30776 - DNA, 32 bp, Artificial; identical to SEQ ID NO: 7676
  oligonucleotide probe

SEQ ID NO: 30777 - DNA, 32 bp, Artificial; identical to SEQ ID NO: 5171
  oligonucleotide probe

SEQ ID NO: 30778 - DNA, 32 bp, Artificial; identical to SEQ ID NO: 5171
  oligonucleotide probe

SEQ ID NO: 30779 - DNA, 32 bp, Artificial; identical to SEQ ID NO: 7624
  oligonucleotide probe

SEQ ID NO: 30780 - DNA, 32 bp, Artificial; identical to SEQ ID NO: 7624
  oligonucleotide probe

SEQ ID NO: 30781 - DNA, 32 bp, Artificial; identical to SEQ ID NO: 7812
  oligonucleotide probe

SEQ ID NO: 30782 - DNA, 32 bp, Artificial; identical to SEQ ID NO: 7812
  oligonucleotide probe

SEQ ID NO: 30783 - DNA, 32 bp, Artificial; identical to SEQ ID NO: 7676
  oligonucleotide probe

SEQ ID NO: 30784 - DNA, 32 bp, Artificial; identical to SEQ ID NO: 7676
  oligonucleotide probe

SEQ ID NO: 30785 - DNA, 32 bp, Artificial; identical to SEQ ID NO: 7605
  oligonucleotide probe

SEQ ID NO: 30786 - DNA, 32 bp, Artificial; identical to SEQ ID NO: 7605
  oligonucleotide probe

SEQ ID NO: 30787 - DNA, 32 bp, Artificial; identical to SEQ ID NO: 5163
  oligonucleotide probe

SEQ ID NO: 30788 - DNA, 32 bp, Artificial; identical to SEQ ID NO: 5163
  oligonucleotide probe

SEQ ID NO: 30789 - DNA, 32 bp, Artificial; identical to SEQ ID NO: 7655
  oligonucleotide probe

SEQ ID NO: 30790 - DNA, 32 bp, Artificial; identical to SEQ ID NO: 7655
  oligonucleotide probe

SEQ ID NO: 30791 - DNA, 32 bp, Artificial; identical to SEQ ID NO: 5163
  oligonucleotide probe

SEQ ID NO: 30792 - DNA, 32 bp, Artificial; identical to SEQ ID NO: 5163
  oligonucleotide probe

SEQ ID NO: 30793 - DNA, 32 bp, Artificial; identical to SEQ ID NO: 7694
  oligonucleotide probe

SEQ ID NO: 30794 - DNA, 32 bp, Artificial; identical to SEQ ID NO: 7694
  oligonucleotide probe

SEQ ID NO: 30795 - DNA, 32 bp, Artificial; identical to SEQ ID NO: 7694
  oligonucleotide probe

SEQ ID NO: 30796 - DNA, 32 bp, Artificial; identical to SEQ ID NO: 7694
  oligonucleotide probe

SEQ ID NO: 30797 - DNA, 32 bp, Artificial; identical to SEQ ID NO: 7690
  oligonucleotide probe

SEQ ID NO: 30798 - DNA, 32 bp, Artificial; identical to SEQ ID NO: 7690
  oligonucleotide probe

SEQ ID NO: 30799 - DNA, 32 bp, Artificial; identical to SEQ ID NO: 7673
  oligonucleotide probe

SEQ ID NO: 30800 - DNA, 32 bp, Artificial; identical to SEQ ID NO: 7673
  oligonucleotide probe

SEQ ID NO: 30801 - DNA, 32 bp, Artificial; identical to SEQ ID NO: 7676
  oligonucleotide probe

SEQ ID NO: 30802 - DNA, 32 bp, Artificial; identical to SEQ ID NO: 7676
  oligonucleotide probe

SEQ ID NO: 30803 - DNA, 32 bp, Artificial; identical to SEQ ID NO: 7676
  oligonucleotide probe

SEQ ID NO: 30804 - DNA, 32 bp, Artificial; identical to SEQ ID NO: 7676
  oligonucleotide probe

SEQ ID NO: 30805 - DNA, 32 bp, Artificial; identical to SEQ ID NO: 7596
  oligonucleotide probe

SEQ ID NO: 30806 - DNA, 32 bp, Artificial; identical to SEQ ID NO: 7596
  oligonucleotide probe

SEQ ID NO: 30807 - DNA, 32 bp, Artificial; identical to SEQ ID NO: 5141
  oligonucleotide probe

SEQ ID NO: 30808 - DNA, 32 bp, Artificial; identical to SEQ ID NO: 5141
  oligonucleotide probe

SEQ ID NO: 30809 - DNA, 32 bp, Artificial; identical to SEQ ID NO: 7676
  oligonucleotide probe

SEQ ID NO: 30810 - DNA, 32 bp, Artificial; identical to SEQ ID NO: 7676
  oligonucleotide probe

SEQ ID NO: 30811 - DNA, 32 bp, Artificial; identical to SEQ ID NO: 7673
  oligonucleotide probe

SEQ ID NO: 30812 - DNA, 32 bp, Artificial; identical to SEQ ID NO: 7673
  oligonucleotide probe

SEQ ID NO: 30813 - DNA, 32 bp, Artificial; identical to SEQ ID NO: 7659
  oligonucleotide probe

SEQ ID NO: 30814 - DNA, 32 bp, Artificial; identical to SEQ ID NO: 7659
  oligonucleotide probe

SEQ ID NO: 30815 - DNA, 32 bp, Artificial; identical to SEQ ID NO: 7644
  oligonucleotide probe

SEQ ID NO: 30816 - DNA, 32 bp, Artificial; identical to SEQ ID NO: 7644
  oligonucleotide probe

SEQ ID NO: 30817 - DNA, 32 bp, Artificial; identical to SEQ ID NO: 5171
  oligonucleotide probe

SEQ ID NO: 30818 - DNA, 32 bp, Artificial; identical to SEQ ID NO: 5171
  oligonucleotide probe

SEQ ID NO: 30819 - DNA, 32 bp, Artificial; identical to SEQ ID NO: 7624
  oligonucleotide probe

SEQ ID NO: 30820 - DNA, 32 bp, Artificial; identical to SEQ ID NO: 7624
  oligonucleotide probe

SEQ ID NO: 30821 - DNA, 32 bp, Artificial; identical to SEQ ID NO: 7659
  oligonucleotide probe

SEQ ID NO: 30822 - DNA, 32 bp, Artificial; identical to SEQ ID NO: 7659
  oligonucleotide probe

SEQ ID NO: 30823 - DNA, 32 bp, Artificial; identical to SEQ ID NO: 7594
  oligonucleotide probe

SEQ ID NO: 30824 - DNA, 32 bp, Artificial; identical to SEQ ID NO: 7594
  oligonucleotide probe

SEQ ID NO: 30825 - DNA, 32 bp, Artificial; identical to SEQ ID NO: 7662
  oligonucleotide probe

SEQ ID NO: 30826 - DNA, 32 bp, Artificial; identical to SEQ ID NO: 7662
  oligonucleotide probe

SEQ ID NO: 30827 - DNA, 32 bp, Artificial; identical to SEQ ID NO: 5185
  oligonucleotide probe

SEQ ID NO: 30828 - DNA, 32 bp, Artificial; identical to SEQ ID NO: 5185
  oligonucleotide probe

SEQ ID NO: 30829 - DNA, 32 bp, Artificial; identical to SEQ ID NO: 5185
  oligonucleotide probe

SEQ ID NO: 30830 - DNA, 32 bp, Artificial; identical to SEQ ID NO: 5185
  oligonucleotide probe

SEQ ID NO: 30831 - DNA, 32 bp, Artificial; identical to SEQ ID NO: 7655
  oligonucleotide probe

SEQ ID NO: 30832 - DNA, 32 bp, Artificial; identical to SEQ ID NO: 7655
  oligonucleotide probe

SEQ ID NO: 30833 - DNA, 32 bp, Artificial; identical to SEQ ID NO: 5171
  oligonucleotide probe

SEQ ID NO: 30834 - DNA, 32 bp, Artificial; identical to SEQ ID NO: 5171
  oligonucleotide probe

SEQ ID NO: 30835 - DNA, 32 bp, Artificial; identical to SEQ ID NO: 7690
  oligonucleotide probe

SEQ ID NO: 30836 - DNA, 32 bp, Artificial; identical to SEQ ID NO: 7690
  oligonucleotide probe

SEQ ID NO: 30837 - DNA, 32 bp, Artificial; identical to SEQ ID NO: 5163
  oligonucleotide probe

SEQ ID NO: 30838 - DNA, 32 bp, Artificial; identical to SEQ ID NO: 5163
  oligonucleotide probe

SEQ ID NO: 30839 - DNA, 32 bp, Artificial; identical to SEQ ID NO: 5159
  oligonucleotide probe

SEQ ID NO: 30840 - DNA, 32 bp, Artificial; identical to SEQ ID NO: 5159
  oligonucleotide probe

SEQ ID NO: 30841 - DNA, 32 bp, Artificial; identical to SEQ ID NO: 8247
  oligonucleotide probe

SEQ ID NO: 30842 - DNA, 32 bp, Artificial; identical to SEQ ID NO: 8247
  oligonucleotide probe

SEQ ID NO: 30843 - DNA, 32 bp, Artificial; identical to SEQ ID NO: 5141
  oligonucleotide probe

SEQ ID NO: 30844 - DNA, 32 bp, Artificial; identical to SEQ ID NO: 5141
  oligonucleotide probe

SEQ ID NO: 30845 - DNA, 32 bp, Artificial; identical to SEQ ID NO: 5160
  oligonucleotide probe

SEQ ID NO: 30846 - DNA, 32 bp, Artificial; identical to SEQ ID NO: 5160
  oligonucleotide probe

SEQ ID NO: 30847 - DNA, 32 bp, Artificial; identical to SEQ ID NO: 7644
  oligonucleotide probe

SEQ ID NO: 30848 - DNA, 32 bp, Artificial; identical to SEQ ID NO: 7644
  oligonucleotide probe

SEQ ID NO: 30849 - DNA, 32 bp, Artificial; identical to SEQ ID NO: 5134
  oligonucleotide probe

SEQ ID NO: 30850 - DNA, 32 bp, Artificial; identical to SEQ ID NO: 5134
  oligonucleotide probe

SEQ ID NO: 30851 - DNA, 32 bp, Artificial; identical to SEQ ID NO: 5185
  oligonucleotide probe

SEQ ID NO: 30852 - DNA, 32 bp, Artificial; identical to SEQ ID NO: 5185
  oligonucleotide probe

SEQ ID NO: 30853 - DNA, 32 bp, Artificial; identical to SEQ ID NO: 7623
  oligonucleotide probe

SEQ ID NO: 30854 - DNA, 32 bp, Artificial; identical to SEQ ID NO: 7623
  oligonucleotide probe

SEQ ID NO: 30855 - DNA, 32 bp, Artificial; identical to SEQ ID NO: 5160
  oligonucleotide probe

SEQ ID NO: 30856 - DNA, 32 bp, Artificial; identical to SEQ ID NO: 5160
  oligonucleotide probe

SEQ ID NO: 30857 - DNA, 32 bp, Artificial; identical to SEQ ID NO: 7606
  oligonucleotide probe

SEQ ID NO: 30858 - DNA, 32 bp, Artificial; identical to SEQ ID NO: 7606
  oligonucleotide probe

SEQ ID NO: 30859 - DNA, 32 bp, Artificial; identical to SEQ ID NO: 7690
  oligonucleotide probe

SEQ ID NO: 30860 - DNA, 32 bp, Artificial; identical to SEQ ID NO: 7690
  oligonucleotide probe

SEQ ID NO: 30861 - DNA, 32 bp, Artificial; identical to SEQ ID NO: 7676
  oligonucleotide probe

SEQ ID NO: 30862 - DNA, 32 bp, Artificial; identical to SEQ ID NO: 7676
  oligonucleotide probe

SEQ ID NO: 30863 - DNA, 32 bp, Artificial; identical to SEQ ID NO: 7662
  oligonucleotide probe

SEQ ID NO: 30864 - DNA, 32 bp, Artificial; identical to SEQ ID NO: 7662
  oligonucleotide probe

SEQ ID NO: 30865 - DNA, 32 bp, Artificial; identical to SEQ ID NO: 8001
  oligonucleotide probe

SEQ ID NO: 30866 - DNA, 32 bp, Artificial; identical to SEQ ID NO: 8001
  oligonucleotide probe

SEQ ID NO: 30867 - DNA, 32 bp, Artificial; identical to SEQ ID NO: 7596
  oligonucleotide probe

SEQ ID NO: 30868 - DNA, 32 bp, Artificial; identical to SEQ ID NO: 7596
  oligonucleotide probe

SEQ ID NO: 30869 - DNA, 32 bp, Artificial; identical to SEQ ID NO: 7596
  oligonucleotide probe

SEQ ID NO: 30870 - DNA, 32 bp, Artificial; identical to SEQ ID NO: 7596
  oligonucleotide probe

SEQ ID NO: 30871 - DNA, 32 bp, Artificial; identical to SEQ ID NO: 5171
  oligonucleotide probe

SEQ ID NO: 30872 - DNA, 32 bp, Artificial; identical to SEQ ID NO: 5171
  oligonucleotide probe

SEQ ID NO: 30873 - DNA, 32 bp, Artificial; identical to SEQ ID NO: 7676
  oligonucleotide probe

SEQ ID NO: 30874 - DNA, 32 bp, Artificial; identical to SEQ ID NO: 7676
  oligonucleotide probe

SEQ ID NO: 30875 - DNA, 32 bp, Artificial; identical to SEQ ID NO: 5163
  oligonucleotide probe

SEQ ID NO: 30876 - DNA, 32 bp, Artificial; identical to SEQ ID NO: 5163
  oligonucleotide probe

SEQ ID NO: 30877 - DNA, 32 bp, Artificial; identical to SEQ ID NO: 5185
  oligonucleotide probe

SEQ ID NO: 30878 - DNA, 32 bp, Artificial; identical to SEQ ID NO: 5185
  oligonucleotide probe

SEQ ID NO: 30879 - DNA, 32 bp, Artificial; identical to SEQ ID NO: 7905
  oligonucleotide probe

SEQ ID NO: 30880 - DNA, 32 bp, Artificial; identical to SEQ ID NO: 7905
  oligonucleotide probe

SEQ ID NO: 30881 - DNA, 32 bp, Artificial; identical to SEQ ID NO: 7783
  oligonucleotide probe

SEQ ID NO: 30882 - DNA, 32 bp, Artificial; identical to SEQ ID NO: 7783
  oligonucleotide probe

SEQ ID NO: 30883 - DNA, 32 bp, Artificial; identical to SEQ ID NO: 5159
  oligonucleotide probe

SEQ ID NO: 30884 - DNA, 32 bp, Artificial; identical to SEQ ID NO: 5159
  oligonucleotide probe

SEQ ID NO: 30885 - DNA, 32 bp, Artificial; identical to SEQ ID NO: 7690
  oligonucleotide probe

SEQ ID NO: 30886 - DNA, 32 bp, Artificial; identical to SEQ ID NO: 7690
  oligonucleotide probe

SEQ ID NO: 30887 - DNA, 32 bp, Artificial; identical to SEQ ID NO: 7662
  oligonucleotide probe

SEQ ID NO: 30888 - DNA, 32 bp, Artificial; identical to SEQ ID NO: 7662
  oligonucleotide probe

SEQ ID NO: 30889 - DNA, 32 bp, Artificial; identical to SEQ ID NO: 5185
  oligonucleotide probe

SEQ ID NO: 30890 - DNA, 32 bp, Artificial; identical to SEQ ID NO: 5185
  oligonucleotide probe

SEQ ID NO: 30891 - DNA, 32 bp, Artificial; identical to SEQ ID NO: 5171
  oligonucleotide probe

SEQ ID NO: 30892 - DNA, 32 bp, Artificial; identical to SEQ ID NO: 5171
  oligonucleotide probe

SEQ ID NO: 30893 - DNA, 32 bp, Artificial; identical to SEQ ID NO: 7594
  oligonucleotide probe

SEQ ID NO: 30894 - DNA, 32 bp, Artificial; identical to SEQ ID NO: 7594
  oligonucleotide probe

SEQ ID NO: 30895 - DNA, 32 bp, Artificial; identical to SEQ ID NO: 5163
  oligonucleotide probe

SEQ ID NO: 30896 - DNA, 32 bp, Artificial; identical to SEQ ID NO: 5163
  oligonucleotide probe

SEQ ID NO: 30897 - DNA, 32 bp, Artificial; identical to SEQ ID NO: 7812
  oligonucleotide probe

SEQ ID NO: 30898 - DNA, 32 bp, Artificial; identical to SEQ ID NO: 7812
  oligonucleotide probe

SEQ ID NO: 30899 - DNA, 32 bp, Artificial; identical to SEQ ID NO: 5185
  oligonucleotide probe

SEQ ID NO: 30900 - DNA, 32 bp, Artificial; identical to SEQ ID NO: 5185
  oligonucleotide probe

SEQ ID NO: 30901 - DNA, 32 bp, Artificial; identical to SEQ ID NO: 5185
  oligonucleotide probe

SEQ ID NO: 30902 - DNA, 32 bp, Artificial; identical to SEQ ID NO: 5185
  oligonucleotide probe

SEQ ID NO: 30903 - DNA, 32 bp, Artificial; identical to SEQ ID NO: 7676
  oligonucleotide probe

SEQ ID NO: 30904 - DNA, 32 bp, Artificial; identical to SEQ ID NO: 7676
  oligonucleotide probe

SEQ ID NO: 30905 - DNA, 32 bp, Artificial; identical to SEQ ID NO: 5159
  oligonucleotide probe

SEQ ID NO: 30906 - DNA, 32 bp, Artificial; identical to SEQ ID NO: 5159
  oligonucleotide probe

SEQ ID NO: 30907 - DNA, 32 bp, Artificial; identical to SEQ ID NO: 7623
  oligonucleotide probe

SEQ ID NO: 30908 - DNA, 32 bp, Artificial; identical to SEQ ID NO: 7623
  oligonucleotide probe

SEQ ID NO: 30909 - DNA, 32 bp, Artificial; identical to SEQ ID NO: 7690
  oligonucleotide probe

SEQ ID NO: 30910 - DNA, 32 bp, Artificial; identical to SEQ ID NO: 7690
  oligonucleotide probe

SEQ ID NO: 30911 - DNA, 32 bp, Artificial; identical to SEQ ID NO: 7694
  oligonucleotide probe

SEQ ID NO: 30912 - DNA, 32 bp, Artificial; identical to SEQ ID NO: 7694
  oligonucleotide probe

SEQ ID NO: 30913 - DNA, 32 bp, Artificial; identical to SEQ ID NO: 7673
  oligonucleotide probe

SEQ ID NO: 30914 - DNA, 32 bp, Artificial; identical to SEQ ID NO: 7673
  oligonucleotide probe

SEQ ID NO: 30915 - DNA, 32 bp, Artificial; identical to SEQ ID NO: 7605
  oligonucleotide probe

SEQ ID NO: 30916 - DNA, 32 bp, Artificial; identical to SEQ ID NO: 7605
  oligonucleotide probe

SEQ ID NO: 30917 - DNA, 32 bp, Artificial; identical to SEQ ID NO: 5171
  oligonucleotide probe

SEQ ID NO: 30918 - DNA, 32 bp, Artificial; identical to SEQ ID NO: 5171
  oligonucleotide probe

SEQ ID NO: 30919 - DNA, 32 bp, Artificial; identical to SEQ ID NO: 7596
  oligonucleotide probe

SEQ ID NO: 30920 - DNA, 32 bp, Artificial; identical to SEQ ID NO: 7596
  oligonucleotide probe

SEQ ID NO: 30921 - DNA, 32 bp, Artificial; identical to SEQ ID NO: 5159
  oligonucleotide probe

SEQ ID NO: 30922 - DNA, 32 bp, Artificial; identical to SEQ ID NO: 5159
  oligonucleotide probe

SEQ ID NO: 30923 - DNA, 32 bp, Artificial; identical to SEQ ID NO: 5134
  oligonucleotide probe

SEQ ID NO: 30924 - DNA, 32 bp, Artificial; identical to SEQ ID NO: 5134
  oligonucleotide probe

SEQ ID NO: 30925 - DNA, 32 bp, Artificial; identical to SEQ ID NO: 7673
  oligonucleotide probe

SEQ ID NO: 30926 - DNA, 32 bp, Artificial; identical to SEQ ID NO: 7673
  oligonucleotide probe

SEQ ID NO: 30927 - DNA, 32 bp, Artificial; identical to SEQ ID NO: 7596
  oligonucleotide probe

SEQ ID NO: 30928 - DNA, 32 bp, Artificial; identical to SEQ ID NO: 7596
  oligonucleotide probe

SEQ ID NO: 30929 - DNA, 32 bp, Artificial; identical to SEQ ID NO: 5163
  oligonucleotide probe

SEQ ID NO: 30930 - DNA, 32 bp, Artificial; identical to SEQ ID NO: 5163
  oligonucleotide probe

SEQ ID NO: 30931 - DNA, 32 bp, Artificial; identical to SEQ ID NO: 7623
  oligonucleotide probe

SEQ ID NO: 30932 - DNA, 32 bp, Artificial; identical to SEQ ID NO: 7623
  oligonucleotide probe

SEQ ID NO: 30933 - DNA, 32 bp, Artificial; identical to SEQ ID NO: 5140
  oligonucleotide probe

SEQ ID NO: 30934 - DNA, 32 bp, Artificial; identical to SEQ ID NO: 5140
  oligonucleotide probe

SEQ ID NO: 30935 - DNA, 32 bp, Artificial; identical to SEQ ID NO: 7624
  oligonucleotide probe

SEQ ID NO: 30936 - DNA, 32 bp, Artificial; identical to SEQ ID NO: 7624
  oligonucleotide probe

SEQ ID NO: 30937 - DNA, 32 bp, Artificial; identical to SEQ ID NO: 7644
  oligonucleotide probe

SEQ ID NO: 30938 - DNA, 32 bp, Artificial; identical to SEQ ID NO: 7644
  oligonucleotide probe

SEQ ID NO: 30939 - DNA, 32 bp, Artificial; identical to SEQ ID NO: 5185
  oligonucleotide probe

SEQ ID NO: 30940 - DNA, 32 bp, Artificial; identical to SEQ ID NO: 5185
  oligonucleotide probe

SEQ ID NO: 30941 - DNA, 32 bp, Artificial; identical to SEQ ID NO: 7606
  oligonucleotide probe

SEQ ID NO: 30942 - DNA, 32 bp, Artificial; identical to SEQ ID NO: 7606
  oligonucleotide probe

SEQ ID NO: 30943 - DNA, 32 bp, Artificial; identical to SEQ ID NO: 5141
  oligonucleotide probe

SEQ ID NO: 30944 - DNA, 32 bp, Artificial; identical to SEQ ID NO: 5141
  oligonucleotide probe

SEQ ID NO: 30945 - DNA, 32 bp, Artificial; identical to SEQ ID NO: 7597
  oligonucleotide probe

SEQ ID NO: 30946 - DNA, 32 bp, Artificial; identical to SEQ ID NO: 7597
  oligonucleotide probe

SEQ ID NO: 30947 - DNA, 32 bp, Artificial; identical to SEQ ID NO: 7655
  oligonucleotide probe

SEQ ID NO: 30948 - DNA, 32 bp, Artificial; identical to SEQ ID NO: 7655
  oligonucleotide probe

SEQ ID NO: 30949 - DNA, 32 bp, Artificial; identical to SEQ ID NO: 7623
  oligonucleotide probe

SEQ ID NO: 30950 - DNA, 32 bp, Artificial; identical to SEQ ID NO: 7623
  oligonucleotide probe

SEQ ID NO: 30951 - DNA, 32 bp, Artificial; identical to SEQ ID NO: 7690
  oligonucleotide probe

SEQ ID NO: 30952 - DNA, 32 bp, Artificial; identical to SEQ ID NO: 7690
  oligonucleotide probe

SEQ ID NO: 30953 - DNA, 32 bp, Artificial; identical to SEQ ID NO: 5171
  oligonucleotide probe

SEQ ID NO: 30954 - DNA, 32 bp, Artificial; identical to SEQ ID NO: 5171
  oligonucleotide probe

SEQ ID NO: 30955 - DNA, 32 bp, Artificial; identical to SEQ ID NO: 5133
  oligonucleotide probe

SEQ ID NO: 30956 - DNA, 32 bp, Artificial; identical to SEQ ID NO: 5133
  oligonucleotide probe

SEQ ID NO: 30957 - DNA, 32 bp, Artificial; identical to SEQ ID NO: 7855
  oligonucleotide probe

SEQ ID NO: 30958 - DNA, 32 bp, Artificial; identical to SEQ ID NO: 7855
  oligonucleotide probe

SEQ ID NO: 30959 - DNA, 32 bp, Artificial; identical to SEQ ID NO: 7598
  oligonucleotide probe

SEQ ID NO: 30960 - DNA, 32 bp, Artificial; identical to SEQ ID NO: 7598
  oligonucleotide probe

SEQ ID NO: 30961 - DNA, 32 bp, Artificial; identical to SEQ ID NO: 7623
  oligonucleotide probe

SEQ ID NO: 30962 - DNA, 32 bp, Artificial; identical to SEQ ID NO: 7623
  oligonucleotide probe

SEQ ID NO: 30963 - DNA, 32 bp, Artificial; identical to SEQ ID NO: 7597
  oligonucleotide probe

SEQ ID NO: 30964 - DNA, 32 bp, Artificial; identical to SEQ ID NO: 7597
  oligonucleotide probe

SEQ ID NO: 30965 - DNA, 32 bp, Artificial; identical to SEQ ID NO: 5133
  oligonucleotide probe

SEQ ID NO: 30966 - DNA, 32 bp, Artificial; identical to SEQ ID NO: 5133
  oligonucleotide probe

SEQ ID NO: 30967 - DNA, 32 bp, Artificial; identical to SEQ ID NO: 7659
  oligonucleotide probe

SEQ ID NO: 30968 - DNA, 32 bp, Artificial; identical to SEQ ID NO: 7659
  oligonucleotide probe

SEQ ID NO: 30969 - DNA, 32 bp, Artificial; identical to SEQ ID NO: 5133
  oligonucleotide probe

SEQ ID NO: 30970 - DNA, 32 bp, Artificial; identical to SEQ ID NO: 5133
  oligonucleotide probe

SEQ ID NO: 30971 - DNA, 32 bp, Artificial; identical to SEQ ID NO: 7644
  oligonucleotide probe

SEQ ID NO: 30972 - DNA, 32 bp, Artificial; identical to SEQ ID NO: 7644
  oligonucleotide probe

SEQ ID NO: 30973 - DNA, 32 bp, Artificial; identical to SEQ ID NO: 7690
  oligonucleotide probe

SEQ ID NO: 30974 - DNA, 32 bp, Artificial; identical to SEQ ID NO: 7690
  oligonucleotide probe

SEQ ID NO: 30975 - DNA, 32 bp, Artificial; identical to SEQ ID NO: 7655
  oligonucleotide probe

SEQ ID NO: 30976 - DNA, 32 bp, Artificial; identical to SEQ ID NO: 7655
  oligonucleotide probe

SEQ ID NO: 30977 - DNA, 32 bp, Artificial; identical to SEQ ID NO: 5140
  oligonucleotide probe

SEQ ID NO: 30978 - DNA, 32 bp, Artificial; identical to SEQ ID NO: 5140
  oligonucleotide probe

SEQ ID NO: 30979 - DNA, 32 bp, Artificial; identical to SEQ ID NO: 7676
  oligonucleotide probe

SEQ ID NO: 30980 - DNA, 32 bp, Artificial; identical to SEQ ID NO: 7676
  oligonucleotide probe

SEQ ID NO: 30981 - DNA, 32 bp, Artificial; identical to SEQ ID NO: 7659
  oligonucleotide probe

SEQ ID NO: 30982 - DNA, 32 bp, Artificial; identical to SEQ ID NO: 7659
  oligonucleotide probe

SEQ ID NO: 30983 - DNA, 32 bp, Artificial; identical to SEQ ID NO: 7690
  oligonucleotide probe

SEQ ID NO: 30984 - DNA, 32 bp, Artificial; identical to SEQ ID NO: 7690
  oligonucleotide probe

SEQ ID NO: 30985 - DNA, 32 bp, Artificial; identical to SEQ ID NO: 5171
  oligonucleotide probe

SEQ ID NO: 30986 - DNA, 32 bp, Artificial; identical to SEQ ID NO: 5171
  oligonucleotide probe

SEQ ID NO: 30987 - DNA, 32 bp, Artificial; identical to SEQ ID NO: 5185
  oligonucleotide probe

SEQ ID NO: 30988 - DNA, 32 bp, Artificial; identical to SEQ ID NO: 5185
  oligonucleotide probe

SEQ ID NO: 30989 - DNA, 32 bp, Artificial; identical to SEQ ID NO: 7783
  oligonucleotide probe

SEQ ID NO: 30990 - DNA, 32 bp, Artificial; identical to SEQ ID NO: 7783
  oligonucleotide probe

SEQ ID NO: 30991 - DNA, 32 bp, Artificial; identical to SEQ ID NO: 5171
  oligonucleotide probe

SEQ ID NO: 30992 - DNA, 32 bp, Artificial; identical to SEQ ID NO: 5171
  oligonucleotide probe

SEQ ID NO: 30993 - DNA, 32 bp, Artificial; identical to SEQ ID NO: 7673
  oligonucleotide probe

SEQ ID NO: 30994 - DNA, 32 bp, Artificial; identical to SEQ ID NO: 7673
  oligonucleotide probe

SEQ ID NO: 30995 - DNA, 32 bp, Artificial; identical to SEQ ID NO: 5141
  oligonucleotide probe

SEQ ID NO: 30996 - DNA, 32 bp, Artificial; identical to SEQ ID NO: 5141
  oligonucleotide probe

SEQ ID NO: 30997 - DNA, 32 bp, Artificial; identical to SEQ ID NO: 7605
  oligonucleotide probe

SEQ ID NO: 30998 - DNA, 32 bp, Artificial; identical to SEQ ID NO: 7605
  oligonucleotide probe

SEQ ID NO: 30999 - DNA, 32 bp, Artificial; identical to SEQ ID NO: 5163
  oligonucleotide probe

SEQ ID NO: 31000 - DNA, 32 bp, Artificial; identical to SEQ ID NO: 5163
  oligonucleotide probe

SEQ ID NO: 31001 - DNA, 32 bp, Artificial; identical to SEQ ID NO: 7662
  oligonucleotide probe

SEQ ID NO: 31002 - DNA, 32 bp, Artificial; identical to SEQ ID NO: 7662
  oligonucleotide probe

SEQ ID NO: 31003 - DNA, 32 bp, Artificial; identical to SEQ ID NO: 7694
  oligonucleotide probe

SEQ ID NO: 31004 - DNA, 32 bp, Artificial; identical to SEQ ID NO: 7694
  oligonucleotide probe

SEQ ID NO: 31005 - DNA, 32 bp, Artificial; identical to SEQ ID NO: 7644
  oligonucleotide probe

SEQ ID NO: 31006 - DNA, 32 bp, Artificial; identical to SEQ ID NO: 7644
  oligonucleotide probe

SEQ ID NO: 31007 - DNA, 32 bp, Artificial; identical to SEQ ID NO: 7659
  oligonucleotide probe

SEQ ID NO: 31008 - DNA, 32 bp, Artificial; identical to SEQ ID NO: 7659
  oligonucleotide probe

SEQ ID NO: 31009 - DNA, 32 bp, Artificial; identical to SEQ ID NO: 7690
  oligonucleotide probe

SEQ ID NO: 31010 - DNA, 32 bp, Artificial; identical to SEQ ID NO: 7690
  oligonucleotide probe

SEQ ID NO: 31011 - DNA, 32 bp, Artificial; identical to SEQ ID NO: 7673
  oligonucleotide probe

SEQ ID NO: 31012 - DNA, 32 bp, Artificial; identical to SEQ ID NO: 7673
  oligonucleotide probe

SEQ ID NO: 31013 - DNA, 32 bp, Artificial; identical to SEQ ID NO: 7690
  oligonucleotide probe

SEQ ID NO: 31014 - DNA, 32 bp, Artificial; identical to SEQ ID NO: 7690
  oligonucleotide probe

SEQ ID NO: 31015 - DNA, 32 bp, Artificial; identical to SEQ ID NO: 7598
  oligonucleotide probe

SEQ ID NO: 31016 - DNA, 32 bp, Artificial; identical to SEQ ID NO: 7598
  oligonucleotide probe

SEQ ID NO: 31017 - DNA, 32 bp, Artificial; identical to SEQ ID NO: 7606
  oligonucleotide probe

SEQ ID NO: 31018 - DNA, 32 bp, Artificial; identical to SEQ ID NO: 7606
  oligonucleotide probe

SEQ ID NO: 31019 - DNA, 32 bp, Artificial; identical to SEQ ID NO: 8244
  oligonucleotide probe

SEQ ID NO: 31020 - DNA, 32 bp, Artificial; identical to SEQ ID NO: 8244
  oligonucleotide probe

SEQ ID NO: 31021 - DNA, 32 bp, Artificial; identical to SEQ ID NO: 7605
  oligonucleotide probe

SEQ ID NO: 31022 - DNA, 32 bp, Artificial; identical to SEQ ID NO: 7605
  oligonucleotide probe

SEQ ID NO: 31023 - DNA, 32 bp, Artificial; identical to SEQ ID NO: 7662
  oligonucleotide probe

SEQ ID NO: 31024 - DNA, 32 bp, Artificial; identical to SEQ ID NO: 7662
  oligonucleotide probe

SEQ ID NO: 31025 - DNA, 32 bp, Artificial; identical to SEQ ID NO: 7655
  oligonucleotide probe

SEQ ID NO: 31026 - DNA, 32 bp, Artificial; identical to SEQ ID NO: 7655
  oligonucleotide probe

SEQ ID NO: 31027 - DNA, 32 bp, Artificial; identical to SEQ ID NO: 5171
  oligonucleotide probe

SEQ ID NO: 31028 - DNA, 32 bp, Artificial; identical to SEQ ID NO: 5171
  oligonucleotide probe

SEQ ID NO: 31029 - DNA, 32 bp, Artificial; identical to SEQ ID NO: 7623
  oligonucleotide probe

SEQ ID NO: 31030 - DNA, 32 bp, Artificial; identical to SEQ ID NO: 7623
  oligonucleotide probe

SEQ ID NO: 31031 - DNA, 32 bp, Artificial; identical to SEQ ID NO: 7947
  oligonucleotide probe

SEQ ID NO: 31032 - DNA, 32 bp, Artificial; identical to SEQ ID NO: 7947
  oligonucleotide probe

SEQ ID NO: 31033 - DNA, 32 bp, Artificial; identical to SEQ ID NO: 5163
  oligonucleotide probe

SEQ ID NO: 31034 - DNA, 32 bp, Artificial; identical to SEQ ID NO: 5163
  oligonucleotide probe

SEQ ID NO: 31035 - DNA, 32 bp, Artificial; identical to SEQ ID NO: 5159
  oligonucleotide probe

SEQ ID NO: 31036 - DNA, 32 bp, Artificial; identical to SEQ ID NO: 5159
  oligonucleotide probe

SEQ ID NO: 31037 - DNA, 32 bp, Artificial; identical to SEQ ID NO: 5136
  oligonucleotide probe

SEQ ID NO: 31038 - DNA, 32 bp, Artificial; identical to SEQ ID NO: 5136
  oligonucleotide probe

SEQ ID NO: 31039 - DNA, 32 bp, Artificial; identical to SEQ ID NO: 7673
  oligonucleotide probe

SEQ ID NO: 31040 - DNA, 32 bp, Artificial; identical to SEQ ID NO: 7673
  oligonucleotide probe

SEQ ID NO: 31041 - DNA, 32 bp, Artificial; identical to SEQ ID NO: 7662
  oligonucleotide probe

SEQ ID NO: 31042 - DNA, 32 bp, Artificial; identical to SEQ ID NO: 7662
  oligonucleotide probe

SEQ ID NO: 31043 - DNA, 32 bp, Artificial; identical to SEQ ID NO: 5133
  oligonucleotide probe

SEQ ID NO: 31044 - DNA, 32 bp, Artificial; identical to SEQ ID NO: 5133
  oligonucleotide probe

SEQ ID NO: 31045 - DNA, 32 bp, Artificial; identical to SEQ ID NO: 7694
  oligonucleotide probe

SEQ ID NO: 31046 - DNA, 32 bp, Artificial; identical to SEQ ID NO: 7694
  oligonucleotide probe

SEQ ID NO: 31047 - DNA, 32 bp, Artificial; identical to SEQ ID NO: 7624
  oligonucleotide probe

SEQ ID NO: 31048 - DNA, 32 bp, Artificial; identical to SEQ ID NO: 7624
  oligonucleotide probe

SEQ ID NO: 31049 - DNA, 32 bp, Artificial; identical to SEQ ID NO: 5171
  oligonucleotide probe

SEQ ID NO: 31050 - DNA, 32 bp, Artificial; identical to SEQ ID NO: 5171
  oligonucleotide probe

SEQ ID NO: 31051 - DNA, 32 bp, Artificial; identical to SEQ ID NO: 7690
  oligonucleotide probe

SEQ ID NO: 31052 - DNA, 32 bp, Artificial; identical to SEQ ID NO: 7690
  oligonucleotide probe

SEQ ID NO: 31053 - DNA, 32 bp, Artificial; identical to SEQ ID NO: 5141
  oligonucleotide probe

SEQ ID NO: 31054 - DNA, 32 bp, Artificial; identical to SEQ ID NO: 5141
  oligonucleotide probe

SEQ ID NO: 31055 - DNA, 32 bp, Artificial; identical to SEQ ID NO: 5140
  oligonucleotide probe

SEQ ID NO: 31056 - DNA, 32 bp, Artificial; identical to SEQ ID NO: 5140
  oligonucleotide probe

SEQ ID NO: 31057 - DNA, 32 bp, Artificial; identical to SEQ ID NO: 7662
  oligonucleotide probe

SEQ ID NO: 31058 - DNA, 32 bp, Artificial; identical to SEQ ID NO: 7662
  oligonucleotide probe

SEQ ID NO: 31059 - DNA, 32 bp, Artificial; identical to SEQ ID NO: 7624
  oligonucleotide probe

SEQ ID NO: 31060 - DNA, 32 bp, Artificial; identical to SEQ ID NO: 7624
  oligonucleotide probe

SEQ ID NO: 31061 - DNA, 32 bp, Artificial; identical to SEQ ID NO: 7659
  oligonucleotide probe

SEQ ID NO: 31062 - DNA, 32 bp, Artificial; identical to SEQ ID NO: 7659
  oligonucleotide probe

SEQ ID NO: 31063 - DNA, 32 bp, Artificial; identical to SEQ ID NO: 7624
  oligonucleotide probe

SEQ ID NO: 31064 - DNA, 32 bp, Artificial; identical to SEQ ID NO: 7624
  oligonucleotide probe

SEQ ID NO: 31065 - DNA, 32 bp, Artificial; identical to SEQ ID NO: 7655
  oligonucleotide probe

SEQ ID NO: 31066 - DNA, 32 bp, Artificial; identical to SEQ ID NO: 7655
  oligonucleotide probe

SEQ ID NO: 31067 - DNA, 32 bp, Artificial; identical to SEQ ID NO: 7783
  oligonucleotide probe

SEQ ID NO: 31068 - DNA, 32 bp, Artificial; identical to SEQ ID NO: 7783
  oligonucleotide probe

SEQ ID NO: 31069 - DNA, 32 bp, Artificial; identical to SEQ ID NO: 5171
  oligonucleotide probe

SEQ ID NO: 31070 - DNA, 32 bp, Artificial; identical to SEQ ID NO: 5171
  oligonucleotide probe

SEQ ID NO: 31071 - DNA, 32 bp, Artificial; identical to SEQ ID NO: 5159
  oligonucleotide probe

SEQ ID NO: 31072 - DNA, 32 bp, Artificial; identical to SEQ ID NO: 5159
  oligonucleotide probe

SEQ ID NO: 31073 - DNA, 32 bp, Artificial; identical to SEQ ID NO: 7676
  oligonucleotide probe

SEQ ID NO: 31074 - DNA, 32 bp, Artificial; identical to SEQ ID NO: 7676
  oligonucleotide probe

SEQ ID NO: 31075 - DNA, 32 bp, Artificial; identical to SEQ ID NO: 7594
  oligonucleotide probe

SEQ ID NO: 31076 - DNA, 32 bp, Artificial; identical to SEQ ID NO: 7594
  oligonucleotide probe

SEQ ID NO: 31077 - DNA, 32 bp, Artificial; identical to SEQ ID NO: 7605
  oligonucleotide probe

SEQ ID NO: 31078 - DNA, 32 bp, Artificial; identical to SEQ ID NO: 7605
  oligonucleotide probe

SEQ ID NO: 31079 - DNA, 32 bp, Artificial; identical to SEQ ID NO: 7673
  oligonucleotide probe

SEQ ID NO: 31080 - DNA, 32 bp, Artificial; identical to SEQ ID NO: 7673
  oligonucleotide probe

SEQ ID NO: 31081 - DNA, 32 bp, Artificial; identical to SEQ ID NO: 7783
  oligonucleotide probe

SEQ ID NO: 31082 - DNA, 32 bp, Artificial; identical to SEQ ID NO: 7783
  oligonucleotide probe

SEQ ID NO: 31083 - DNA, 32 bp, Artificial; identical to SEQ ID NO: 5136
  oligonucleotide probe

SEQ ID NO: 31084 - DNA, 32 bp, Artificial; identical to SEQ ID NO: 5136
  oligonucleotide probe

SEQ ID NO: 31085 - DNA, 32 bp, Artificial; identical to SEQ ID NO: 7644
  oligonucleotide probe

SEQ ID NO: 31086 - DNA, 32 bp, Artificial; identical to SEQ ID NO: 7644
  oligonucleotide probe

SEQ ID NO: 31087 - DNA, 32 bp, Artificial; identical to SEQ ID NO: 7655
  oligonucleotide probe

SEQ ID NO: 31088 - DNA, 32 bp, Artificial; identical to SEQ ID NO: 7655
  oligonucleotide probe

SEQ ID NO: 31089 - DNA, 32 bp, Artificial; identical to SEQ ID NO: 5133
  oligonucleotide probe

SEQ ID NO: 31090 - DNA, 32 bp, Artificial; identical to SEQ ID NO: 5133
  oligonucleotide probe

SEQ ID NO: 31091 - DNA, 32 bp, Artificial; identical to SEQ ID NO: 7624
  oligonucleotide probe

SEQ ID NO: 31092 - DNA, 32 bp, Artificial; identical to SEQ ID NO: 7624
  oligonucleotide probe

SEQ ID NO: 31093 - DNA, 32 bp, Artificial; identical to SEQ ID NO: 7676
  oligonucleotide probe

SEQ ID NO: 31094 - DNA, 32 bp, Artificial; identical to SEQ ID NO: 7676
  oligonucleotide probe

SEQ ID NO: 31095 - DNA, 32 bp, Artificial; identical to SEQ ID NO: 7623
  oligonucleotide probe

SEQ ID NO: 31096 - DNA, 32 bp, Artificial; identical to SEQ ID NO: 7623
  oligonucleotide probe

SEQ ID NO: 31097 - DNA, 32 bp, Artificial; identical to SEQ ID NO: 5159
  oligonucleotide probe

SEQ ID NO: 31098 - DNA, 32 bp, Artificial; identical to SEQ ID NO: 5159
  oligonucleotide probe

SEQ ID NO: 31099 - DNA, 32 bp, Artificial; identical to SEQ ID NO: 5141
  oligonucleotide probe

SEQ ID NO: 31100 - DNA, 32 bp, Artificial; identical to SEQ ID NO: 5141
  oligonucleotide probe

SEQ ID NO: 31101 - DNA, 32 bp, Artificial; identical to SEQ ID NO: 7662
  oligonucleotide probe

SEQ ID NO: 31102 - DNA, 32 bp, Artificial; identical to SEQ ID NO: 7662
  oligonucleotide probe

SEQ ID NO: 31103 - DNA, 32 bp, Artificial; identical to SEQ ID NO: 7833
  oligonucleotide probe

SEQ ID NO: 31104 - DNA, 32 bp, Artificial; identical to SEQ ID NO: 7833
  oligonucleotide probe

SEQ ID NO: 31105 - DNA, 32 bp, Artificial; identical to SEQ ID NO: 7662
  oligonucleotide probe

SEQ ID NO: 31106 - DNA, 32 bp, Artificial; identical to SEQ ID NO: 7662
  oligonucleotide probe

SEQ ID NO: 31107 - DNA, 32 bp, Artificial; identical to SEQ ID NO: 5141
  oligonucleotide probe

SEQ ID NO: 31108 - DNA, 32 bp, Artificial; identical to SEQ ID NO: 5141
  oligonucleotide probe

SEQ ID NO: 31109 - DNA, 32 bp, Artificial; identical to SEQ ID NO: 7905
  oligonucleotide probe

SEQ ID NO: 31110 - DNA, 32 bp, Artificial; identical to SEQ ID NO: 8240
  oligonucleotide probe

SEQ ID NO: 31111 - DNA, 32 bp, Artificial; identical to SEQ ID NO: 5217
  oligonucleotide probe

SEQ ID NO: 31112 - DNA, 32 bp, Artificial; identical to SEQ ID NO: 7855
  oligonucleotide probe

SEQ ID NO: 31113 - DNA, 32 bp, Artificial; identical to SEQ ID NO: 7833
  oligonucleotide probe

SEQ ID NO: 31114 - DNA, 32 bp, Artificial; identical to SEQ ID NO: 8244
  oligonucleotide probe

SEQ ID NO: 31115 - DNA, 32 bp, Artificial; identical to SEQ ID NO: 5239
  oligonucleotide probe

SEQ ID NO: 31116 - DNA, 32 bp, Artificial; identical to SEQ ID NO: 7856
  oligonucleotide probe

SEQ ID NO: 31117 - DNA, 32 bp, Artificial; identical to SEQ ID NO: 8247
  oligonucleotide probe

SEQ ID NO: 31118 - DNA, 32 bp, Artificial; identical to SEQ ID NO: 5416
  oligonucleotide probe

SEQ ID NO: 31119 - DNA, 32 bp, Artificial; identical to SEQ ID NO: 7948
  oligonucleotide probe

SEQ ID NO: 31120 - DNA, 32 bp, Artificial; identical to SEQ ID NO: 5223
  oligonucleotide probe

SEQ ID NO: 31121 - DNA, 32 bp, Artificial; identical to SEQ ID NO: 5231
  oligonucleotide probe

SEQ ID NO: 31122 - DNA, 32 bp, Artificial; identical to SEQ ID NO: 7947
  oligonucleotide probe

SEQ ID NO: 31123 - DNA, 32 bp, Artificial; identical to SEQ ID NO: 8001
  oligonucleotide probe

SEQ ID NO: 31124 - DNA, 32 bp, Artificial; identical to SEQ ID NO: 7863
  oligonucleotide probe

SEQ ID NO: 31125 - DNA, 32 bp, Artificial; identical to SEQ ID NO: 7834
  oligonucleotide probe

SEQ ID NO: 31126 - DNA, 32 bp, Artificial; identical to SEQ ID NO: 11756
  oligonucleotide probe

SEQ ID NO: 31127 - DNA, 32 bp, Artificial; identical to SEQ ID NO: 11756
  oligonucleotide probe

SEQ ID NO: 31128 - DNA, 32 bp, Artificial; identical to SEQ ID NO: 11185
  oligonucleotide probe

SEQ ID NO: 31129 - DNA, 32 bp, Artificial; identical to SEQ ID NO: 11185
  oligonucleotide probe

SEQ ID NO: 31130 - DNA, 32 bp, Artificial; identical to SEQ ID NO: 11171
  oligonucleotide probe

SEQ ID NO: 31131 - DNA, 32 bp, Artificial; identical to SEQ ID NO: 11171
  oligonucleotide probe

SEQ ID NO: 31132 - DNA, 32 bp, Artificial; identical to SEQ ID NO: 11762
  oligonucleotide probe

SEQ ID NO: 31133 - DNA, 32 bp, Artificial; identical to SEQ ID NO: 11762
  oligonucleotide probe

SEQ ID NO: 31134 - DNA, 32 bp, Artificial; identical to SEQ ID NO: 11764
  oligonucleotide probe

SEQ ID NO: 31135 - DNA, 32 bp, Artificial; identical to SEQ ID NO: 11764
  oligonucleotide probe

SEQ ID NO: 31136 - DNA, 32 bp, Artificial; identical to SEQ ID NO: 11181
  oligonucleotide probe

SEQ ID NO: 31137 - DNA, 32 bp, Artificial; identical to SEQ ID NO: 11181
  oligonucleotide probe

SEQ ID NO: 31138 - DNA, 32 bp, Artificial; identical to SEQ ID NO: 11163
  oligonucleotide probe

SEQ ID NO: 31139 - DNA, 32 bp, Artificial; identical to SEQ ID NO: 11163
  oligonucleotide probe

SEQ ID NO: 31140 - DNA, 32 bp, Artificial; identical to SEQ ID NO: 11770
  oligonucleotide probe

SEQ ID NO: 31141 - DNA, 32 bp, Artificial; identical to SEQ ID NO: 11770
  oligonucleotide probe

SEQ ID NO: 31142 - DNA, 32 bp, Artificial; identical to SEQ ID NO: 11165
  oligonucleotide probe

SEQ ID NO: 31143 - DNA, 32 bp, Artificial; identical to SEQ ID NO: 11165
  oligonucleotide probe

SEQ ID NO: 31144 - DNA, 32 bp, Artificial; identical to SEQ ID NO: 11181
  oligonucleotide probe

SEQ ID NO: 31145 - DNA, 32 bp, Artificial; identical to SEQ ID NO: 11181
  oligonucleotide probe

SEQ ID NO: 31146 - DNA, 32 bp, Artificial; identical to SEQ ID NO: 11177
  oligonucleotide probe

SEQ ID NO: 31147 - DNA, 32 bp, Artificial; identical to SEQ ID NO: 11177
  oligonucleotide probe

SEQ ID NO: 31148 - DNA, 32 bp, Artificial; identical to SEQ ID NO: 11764
  oligonucleotide probe

SEQ ID NO: 31149 - DNA, 32 bp, Artificial; identical to SEQ ID NO: 11764
  oligonucleotide probe

SEQ ID NO: 31150 - DNA, 32 bp, Artificial; identical to SEQ ID NO: 11756
  oligonucleotide probe

SEQ ID NO: 31151 - DNA, 32 bp, Artificial; identical to SEQ ID NO: 11756
  oligonucleotide probe

SEQ ID NO: 31152 - DNA, 32 bp, Artificial; identical to SEQ ID NO: 11764
  oligonucleotide probe

SEQ ID NO: 31153 - DNA, 32 bp, Artificial; identical to SEQ ID NO: 11764
  oligonucleotide probe

SEQ ID NO: 31154 - DNA, 32 bp, Artificial; identical to SEQ ID NO: 11764
  oligonucleotide probe

SEQ ID NO: 31155 - DNA, 32 bp, Artificial; identical to SEQ ID NO: 11764
  oligonucleotide probe

SEQ ID NO: 31156 - DNA, 32 bp, Artificial; identical to SEQ ID NO: 11181
  oligonucleotide probe

SEQ ID NO: 31157 - DNA, 32 bp, Artificial; identical to SEQ ID NO: 11181
  oligonucleotide probe

SEQ ID NO: 31158 - DNA, 32 bp, Artificial; identical to SEQ ID NO: 11181
  oligonucleotide probe

SEQ ID NO: 31159 - DNA, 32 bp, Artificial; identical to SEQ ID NO: 11181
  oligonucleotide probe

SEQ ID NO: 31160 - DNA, 32 bp, Artificial; identical to SEQ ID NO: 11177
  oligonucleotide probe

SEQ ID NO: 31161 - DNA, 32 bp, Artificial; identical to SEQ ID NO: 11177
  oligonucleotide probe

SEQ ID NO: 31162 - DNA, 32 bp, Artificial; identical to SEQ ID NO: 11171
  oligonucleotide probe

SEQ ID NO: 31163 - DNA, 32 bp, Artificial; identical to SEQ ID NO: 11171
  oligonucleotide probe

SEQ ID NO: 31164 - DNA, 32 bp, Artificial; identical to SEQ ID NO: 11165
  oligonucleotide probe

SEQ ID NO: 31165 - DNA, 32 bp, Artificial; identical to SEQ ID NO: 11165
  oligonucleotide probe

SEQ ID NO: 31166 - DNA, 32 bp, Artificial; identical to SEQ ID NO: 11181
  oligonucleotide probe

SEQ ID NO: 31167 - DNA, 32 bp, Artificial; identical to SEQ ID NO: 11181
  oligonucleotide probe

SEQ ID NO: 31168 - DNA, 32 bp, Artificial; identical to SEQ ID NO: 11770
  oligonucleotide probe

SEQ ID NO: 31169 - DNA, 32 bp, Artificial; identical to SEQ ID NO: 11770
  oligonucleotide probe

SEQ ID NO: 31170 - DNA, 32 bp, Artificial; identical to SEQ ID NO: 11762
  oligonucleotide probe

SEQ ID NO: 31171 - DNA, 32 bp, Artificial; identical to SEQ ID NO: 11762
  oligonucleotide probe

SEQ ID NO: 31172 - DNA, 32 bp, Artificial; identical to SEQ ID NO: 11764
  oligonucleotide probe

SEQ ID NO: 31173 - DNA, 32 bp, Artificial; identical to SEQ ID NO: 11764
  oligonucleotide probe

SEQ ID NO: 31174 - DNA, 32 bp, Artificial; identical to SEQ ID NO: 11167
  oligonucleotide probe

SEQ ID NO: 31175 - DNA, 32 bp, Artificial; identical to SEQ ID NO: 11167
  oligonucleotide probe

SEQ ID NO: 31176 - DNA, 32 bp, Artificial; identical to SEQ ID NO: 11173
  oligonucleotide probe

SEQ ID NO: 31177 - DNA, 32 bp, Artificial; identical to SEQ ID NO: 11173
  oligonucleotide probe

SEQ ID NO: 31178 - DNA, 32 bp, Artificial; identical to SEQ ID NO: 11770
  oligonucleotide probe

SEQ ID NO: 31179 - DNA, 32 bp, Artificial; identical to SEQ ID NO: 11770
  oligonucleotide probe

SEQ ID NO: 31180 - DNA, 32 bp, Artificial; identical to SEQ ID NO: 11173
  oligonucleotide probe

SEQ ID NO: 31181 - DNA, 32 bp, Artificial; identical to SEQ ID NO: 11173
  oligonucleotide probe

SEQ ID NO: 31182 - DNA, 32 bp, Artificial; identical to SEQ ID NO: 11163
  oligonucleotide probe

SEQ ID NO: 31183 - DNA, 32 bp, Artificial; identical to SEQ ID NO: 11163
  oligonucleotide probe

SEQ ID NO: 31184 - DNA, 32 bp, Artificial; identical to SEQ ID NO: 11167
  oligonucleotide probe

SEQ ID NO: 31185 - DNA, 32 bp, Artificial; identical to SEQ ID NO: 11167
  oligonucleotide probe

SEQ ID NO: 31186 - DNA, 32 bp, Artificial; identical to SEQ ID NO: 11762
  oligonucleotide probe

SEQ ID NO: 31187 - DNA, 32 bp, Artificial; identical to SEQ ID NO: 11762
  oligonucleotide probe

SEQ ID NO: 31188 - DNA, 32 bp, Artificial; identical to SEQ ID NO: 11764
  oligonucleotide probe

SEQ ID NO: 31189 - DNA, 32 bp, Artificial; identical to SEQ ID NO: 11764
  oligonucleotide probe

SEQ ID NO: 31190 - DNA, 32 bp, Artificial; identical to SEQ ID NO: 11173
  oligonucleotide probe

SEQ ID NO: 31191 - DNA, 32 bp, Artificial; identical to SEQ ID NO: 11173
  oligonucleotide probe

SEQ ID NO: 31192 - DNA, 32 bp, Artificial; identical to SEQ ID NO: 11173
  oligonucleotide probe

SEQ ID NO: 31193 - DNA, 32 bp, Artificial; identical to SEQ ID NO: 11173
  oligonucleotide probe

SEQ ID NO: 31194 - DNA, 32 bp, Artificial; identical to SEQ ID NO: 11762
  oligonucleotide probe

SEQ ID NO: 31195 - DNA, 32 bp, Artificial; identical to SEQ ID NO: 11762
  oligonucleotide probe

SEQ ID NO: 31196 - DNA, 32 bp, Artificial; identical to SEQ ID NO: 11764
  oligonucleotide probe

SEQ ID NO: 31197 - DNA, 32 bp, Artificial; identical to SEQ ID NO: 11764
  oligonucleotide probe

SEQ ID NO: 31198 - DNA, 32 bp, Artificial; identical to SEQ ID NO: 11762
  oligonucleotide probe

SEQ ID NO: 31199 - DNA, 32 bp, Artificial; identical to SEQ ID NO: 11762
  oligonucleotide probe

SEQ ID NO: 31200 - DNA, 32 bp, Artificial; identical to SEQ ID NO: 11181
  oligonucleotide probe

SEQ ID NO: 31201 - DNA, 32 bp, Artificial; identical to SEQ ID NO: 11181
  oligonucleotide probe

SEQ ID NO: 31202 - DNA, 32 bp, Artificial; identical to SEQ ID NO: 11167
  oligonucleotide probe

SEQ ID NO: 31203 - DNA, 32 bp, Artificial; identical to SEQ ID NO: 11167
  oligonucleotide probe

SEQ ID NO: 31204 - DNA, 32 bp, Artificial; identical to SEQ ID NO: 11167
  oligonucleotide probe

SEQ ID NO: 31205 - DNA, 32 bp, Artificial; identical to SEQ ID NO: 11167
  oligonucleotide probe

SEQ ID NO: 31206 - DNA, 32 bp, Artificial; identical to SEQ ID NO: 11756
  oligonucleotide probe

SEQ ID NO: 31207 - DNA, 32 bp, Artificial; identical to SEQ ID NO: 11756
  oligonucleotide probe

SEQ ID NO: 31208 - DNA, 32 bp, Artificial; identical to SEQ ID NO: 11764
  oligonucleotide probe

SEQ ID NO: 31209 - DNA, 32 bp, Artificial; identical to SEQ ID NO: 11764
  oligonucleotide probe

SEQ ID NO: 31210 - DNA, 32 bp, Artificial; identical to SEQ ID NO: 11756
  oligonucleotide probe

SEQ ID NO: 31211 - DNA, 32 bp, Artificial; identical to SEQ ID NO: 11756
  oligonucleotide probe

SEQ ID NO: 31212 - DNA, 32 bp, Artificial; identical to SEQ ID NO: 11167
  oligonucleotide probe

SEQ ID NO: 31213 - DNA, 32 bp, Artificial; identical to SEQ ID NO: 11167
  oligonucleotide probe

SEQ ID NO: 31214 - DNA, 32 bp, Artificial; identical to SEQ ID NO: 11185
  oligonucleotide probe

SEQ ID NO: 31215 - DNA, 32 bp, Artificial; identical to SEQ ID NO: 11185
  oligonucleotide probe

SEQ ID NO: 31216 - DNA, 32 bp, Artificial; identical to SEQ ID NO: 11762
  oligonucleotide probe

SEQ ID NO: 31217 - DNA, 32 bp, Artificial; identical to SEQ ID NO: 11762
  oligonucleotide probe

SEQ ID NO: 31218 - DNA, 32 bp, Artificial; identical to SEQ ID NO: 11165
  oligonucleotide probe

SEQ ID NO: 31219 - DNA, 32 bp, Artificial; identical to SEQ ID NO: 11165
  oligonucleotide probe

SEQ ID NO: 31220 - DNA, 32 bp, Artificial; identical to SEQ ID NO: 11181
  oligonucleotide probe

SEQ ID NO: 31221 - DNA, 32 bp, Artificial; identical to SEQ ID NO: 11181
  oligonucleotide probe

SEQ ID NO: 31222 - DNA, 32 bp, Artificial; identical to SEQ ID NO: 11171
  oligonucleotide probe

SEQ ID NO: 31223 - DNA, 32 bp, Artificial; identical to SEQ ID NO: 11171
  oligonucleotide probe

SEQ ID NO: 31224 - DNA, 32 bp, Artificial; identical to SEQ ID NO: 11770
  oligonucleotide probe

SEQ ID NO: 31225 - DNA, 32 bp, Artificial; identical to SEQ ID NO: 11770
  oligonucleotide probe

SEQ ID NO: 31226 - DNA, 32 bp, Artificial; identical to SEQ ID NO: 11181
  oligonucleotide probe

SEQ ID NO: 31227 - DNA, 32 bp, Artificial; identical to SEQ ID NO: 11181
  oligonucleotide probe

SEQ ID NO: 31228 - DNA, 32 bp, Artificial; identical to SEQ ID NO: 11163
  oligonucleotide probe

SEQ ID NO: 31229 - DNA, 32 bp, Artificial; identical to SEQ ID NO: 11163
  oligonucleotide probe

SEQ ID NO: 31230 - DNA, 32 bp, Artificial; identical to SEQ ID NO: 11163
  oligonucleotide probe

SEQ ID NO: 31231 - DNA, 32 bp, Artificial; identical to SEQ ID NO: 11163
  oligonucleotide probe

SEQ ID NO: 31232 - DNA, 32 bp, Artificial; identical to SEQ ID NO: 11756
  oligonucleotide probe

SEQ ID NO: 31233 - DNA, 32 bp, Artificial; identical to SEQ ID NO: 11756
  oligonucleotide probe

SEQ ID NO: 31234 - DNA, 32 bp, Artificial; identical to SEQ ID NO: 11185
  oligonucleotide probe

SEQ ID NO: 31235 - DNA, 32 bp, Artificial; identical to SEQ ID NO: 11185
  oligonucleotide probe

SEQ ID NO: 31236 - DNA, 32 bp, Artificial; identical to SEQ ID NO: 11764
  oligonucleotide probe

SEQ ID NO: 31237 - DNA, 32 bp, Artificial; identical to SEQ ID NO: 11764
  oligonucleotide probe

SEQ ID NO: 31238 - DNA, 32 bp, Artificial; identical to SEQ ID NO: 11770
  oligonucleotide probe

SEQ ID NO: 31239 - DNA, 32 bp, Artificial; identical to SEQ ID NO: 11770
  oligonucleotide probe

SEQ ID NO: 31240 - DNA, 32 bp, Artificial; identical to SEQ ID NO: 11165
  oligonucleotide probe

SEQ ID NO: 31241 - DNA, 32 bp, Artificial; identical to SEQ ID NO: 11165
  oligonucleotide probe

SEQ ID NO: 31242 - DNA, 32 bp, Artificial; identical to SEQ ID NO: 11185
  oligonucleotide probe

SEQ ID NO: 31243 - DNA, 32 bp, Artificial; identical to SEQ ID NO: 11185
  oligonucleotide probe

SEQ ID NO: 31244 - DNA, 32 bp, Artificial; identical to SEQ ID NO: 11177
  oligonucleotide probe

SEQ ID NO: 31245 - DNA, 32 bp, Artificial; identical to SEQ ID NO: 11177
  oligonucleotide probe

SEQ ID NO: 31246 - DNA, 32 bp, Artificial; identical to SEQ ID NO: 11165
  oligonucleotide probe

SEQ ID NO: 31247 - DNA, 32 bp, Artificial; identical to SEQ ID NO: 11165
  oligonucleotide probe

SEQ ID NO: 31248 - DNA, 32 bp, Artificial; identical to SEQ ID NO: 11163
  oligonucleotide probe

SEQ ID NO: 31249 - DNA, 32 bp, Artificial; identical to SEQ ID NO: 11163
  oligonucleotide probe

SEQ ID NO: 31250 - DNA, 32 bp, Artificial; identical to SEQ ID NO: 11762
  oligonucleotide probe

SEQ ID NO: 31251 - DNA, 32 bp, Artificial; identical to SEQ ID NO: 11762
  oligonucleotide probe

SEQ ID NO: 31252 - DNA, 32 bp, Artificial; identical to SEQ ID NO: 11173
  oligonucleotide probe

SEQ ID NO: 31253 - DNA, 32 bp, Artificial; identical to SEQ ID NO: 11173
  oligonucleotide probe

SEQ ID NO: 31254 - DNA, 32 bp, Artificial; identical to SEQ ID NO: 11185
  oligonucleotide probe

SEQ ID NO: 31255 - DNA, 32 bp, Artificial; identical to SEQ ID NO: 11185
  oligonucleotide probe

SEQ ID NO: 31256 - DNA, 32 bp, Artificial; identical to SEQ ID NO: 11762
  oligonucleotide probe

SEQ ID NO: 31257 - DNA, 32 bp, Artificial; identical to SEQ ID NO: 11762
  oligonucleotide probe

SEQ ID NO: 31258 - DNA, 32 bp, Artificial; identical to SEQ ID NO: 11177
  oligonucleotide probe

SEQ ID NO: 31259 - DNA, 32 bp, Artificial; identical to SEQ ID NO: 11177
  oligonucleotide probe

SEQ ID NO: 31260 - DNA, 32 bp, Artificial; identical to SEQ ID NO: 11167
  oligonucleotide probe

SEQ ID NO: 31261 - DNA, 32 bp, Artificial; identical to SEQ ID NO: 11167
  oligonucleotide probe

SEQ ID NO: 31262 - DNA, 32 bp, Artificial; identical to SEQ ID NO: 11764
  oligonucleotide probe

SEQ ID NO: 31263 - DNA, 32 bp, Artificial; identical to SEQ ID NO: 11764
  oligonucleotide probe

SEQ ID NO: 31264 - DNA, 32 bp, Artificial; identical to SEQ ID NO: 11167
  oligonucleotide probe

SEQ ID NO: 31265 - DNA, 32 bp, Artificial; identical to SEQ ID NO: 11167
  oligonucleotide probe

SEQ ID NO: 31266 - DNA, 32 bp, Artificial; identical to SEQ ID NO: 11185
  oligonucleotide probe

SEQ ID NO: 31267 - DNA, 32 bp, Artificial; identical to SEQ ID NO: 11185
  oligonucleotide probe

SEQ ID NO: 31268 - DNA, 32 bp, Artificial; identical to SEQ ID NO: 11756
  oligonucleotide probe

SEQ ID NO: 31269 - DNA, 32 bp, Artificial; identical to SEQ ID NO: 11756
  oligonucleotide probe

SEQ ID NO: 31270 - DNA, 32 bp, Artificial; identical to SEQ ID NO: 11764
  oligonucleotide probe

SEQ ID NO: 31271 - DNA, 32 bp, Artificial; identical to SEQ ID NO: 11764
  oligonucleotide probe

SEQ ID NO: 31272 - DNA, 32 bp, Artificial; identical to SEQ ID NO: 11163
  oligonucleotide probe

SEQ ID NO: 31273 - DNA, 32 bp, Artificial; identical to SEQ ID NO: 11163
  oligonucleotide probe

SEQ ID NO: 31274 - DNA, 32 bp, Artificial; identical to SEQ ID NO: 11165
  oligonucleotide probe

SEQ ID NO: 31275 - DNA, 32 bp, Artificial; identical to SEQ ID NO: 11165
  oligonucleotide probe

SEQ ID NO: 31276 - DNA, 32 bp, Artificial; identical to SEQ ID NO: 11756
  oligonucleotide probe

SEQ ID NO: 31277 - DNA, 32 bp, Artificial; identical to SEQ ID NO: 11756
  oligonucleotide probe

SEQ ID NO: 31278 - DNA, 32 bp, Artificial; identical to SEQ ID NO: 11770
  oligonucleotide probe

SEQ ID NO: 31279 - DNA, 32 bp, Artificial; identical to SEQ ID NO: 11770
  oligonucleotide probe

SEQ ID NO: 31280 - DNA, 32 bp, Artificial; identical to SEQ ID NO: 11171
  oligonucleotide probe

SEQ ID NO: 31281 - DNA, 32 bp, Artificial; identical to SEQ ID NO: 11171
  oligonucleotide probe

SEQ ID NO: 31282 - DNA, 32 bp, Artificial; identical to SEQ ID NO: 11756
  oligonucleotide probe

SEQ ID NO: 31283 - DNA, 32 bp, Artificial; identical to SEQ ID NO: 11756
  oligonucleotide probe

SEQ ID NO: 31284 - DNA, 32 bp, Artificial; identical to SEQ ID NO: 11762
  oligonucleotide probe

SEQ ID NO: 31285 - DNA, 32 bp, Artificial; identical to SEQ ID NO: 11762
  oligonucleotide probe

SEQ ID NO: 31286 - DNA, 32 bp, Artificial; identical to SEQ ID NO: 11756
  oligonucleotide probe

SEQ ID NO: 31287 - DNA, 32 bp, Artificial; identical to SEQ ID NO: 11756
  oligonucleotide probe

SEQ ID NO: 31288 - DNA, 32 bp, Artificial; identical to SEQ ID NO: 11181
  oligonucleotide probe

SEQ ID NO: 31289 - DNA, 32 bp, Artificial; identical to SEQ ID NO: 11181
  oligonucleotide probe

SEQ ID NO: 31290 - DNA, 32 bp, Artificial; identical to SEQ ID NO: 11770
  oligonucleotide probe

SEQ ID NO: 31291 - DNA, 32 bp, Artificial; identical to SEQ ID NO: 11770
  oligonucleotide probe

SEQ ID NO: 31292 - DNA, 32 bp, Artificial; identical to SEQ ID NO: 11163
  oligonucleotide probe

SEQ ID NO: 31293 - DNA, 32 bp, Artificial; identical to SEQ ID NO: 11163
  oligonucleotide probe

SEQ ID NO: 31294 - DNA, 32 bp, Artificial; identical to SEQ ID NO: 11770
  oligonucleotide probe

SEQ ID NO: 31295 - DNA, 32 bp, Artificial; identical to SEQ ID NO: 11770
  oligonucleotide probe

SEQ ID NO: 31296 - DNA, 32 bp, Artificial; identical to SEQ ID NO: 11756
  oligonucleotide probe

SEQ ID NO: 31297 - DNA, 32 bp, Artificial; identical to SEQ ID NO: 11756
  oligonucleotide probe

SEQ ID NO: 31298 - DNA, 32 bp, Artificial; identical to SEQ ID NO: 11165
  oligonucleotide probe

SEQ ID NO: 31299 - DNA, 32 bp, Artificial; identical to SEQ ID NO: 11165
  oligonucleotide probe

SEQ ID NO: 31300 - DNA, 32 bp, Artificial; identical to SEQ ID NO: 11770
  oligonucleotide probe

SEQ ID NO: 31301 - DNA, 32 bp, Artificial; identical to SEQ ID NO: 11770
  oligonucleotide probe

SEQ ID NO: 31302 - DNA, 32 bp, Artificial; identical to SEQ ID NO: 11163
  oligonucleotide probe

SEQ ID NO: 31303 - DNA, 32 bp, Artificial; identical to SEQ ID NO: 11163
  oligonucleotide probe

SEQ ID NO: 31304 - DNA, 32 bp, Artificial; identical to SEQ ID NO: 11171
  oligonucleotide probe

SEQ ID NO: 31305 - DNA, 32 bp, Artificial; identical to SEQ ID NO: 11171
  oligonucleotide probe

SEQ ID NO: 31306 - DNA, 32 bp, Artificial; identical to SEQ ID NO: 11762
  oligonucleotide probe

SEQ ID NO: 31307 - DNA, 32 bp, Artificial; identical to SEQ ID NO: 11762
  oligonucleotide probe

SEQ ID NO: 31308 - DNA, 32 bp, Artificial; identical to SEQ ID NO: 11173
  oligonucleotide probe

SEQ ID NO: 31309 - DNA, 32 bp, Artificial; identical to SEQ ID NO: 11173
  oligonucleotide probe

SEQ ID NO: 31310 - DNA, 32 bp, Artificial; identical to SEQ ID NO: 11185
  oligonucleotide probe

SEQ ID NO: 31311 - DNA, 32 bp, Artificial; identical to SEQ ID NO: 11185
  oligonucleotide probe

SEQ ID NO: 31312 - DNA, 32 bp, Artificial; identical to SEQ ID NO: 11762
  oligonucleotide probe

SEQ ID NO: 31313 - DNA, 32 bp, Artificial; identical to SEQ ID NO: 11762
  oligonucleotide probe

SEQ ID NO: 31314 - DNA, 32 bp, Artificial; identical to SEQ ID NO: 11171
  oligonucleotide probe

SEQ ID NO: 31315 - DNA, 32 bp, Artificial; identical to SEQ ID NO: 11171
  oligonucleotide probe

SEQ ID NO: 31316 - DNA, 32 bp, Artificial; identical to SEQ ID NO: 11177
  oligonucleotide probe

SEQ ID NO: 31317 - DNA, 32 bp, Artificial; identical to SEQ ID NO: 11177
  oligonucleotide probe

SEQ ID NO: 31318 - DNA, 32 bp, Artificial; identical to SEQ ID NO: 11181
  oligonucleotide probe

SEQ ID NO: 31319 - DNA, 32 bp, Artificial; identical to SEQ ID NO: 11181
  oligonucleotide probe

SEQ ID NO: 31320 - DNA, 32 bp, Artificial; identical to SEQ ID NO: 11167
  oligonucleotide probe

SEQ ID NO: 31321 - DNA, 32 bp, Artificial; identical to SEQ ID NO: 11167
  oligonucleotide probe

SEQ ID NO: 31322 - DNA, 32 bp, Artificial; identical to SEQ ID NO: 11171
  oligonucleotide probe

SEQ ID NO: 31323 - DNA, 32 bp, Artificial; identical to SEQ ID NO: 11171
  oligonucleotide probe

SEQ ID NO: 31324 - DNA, 32 bp, Artificial; identical to SEQ ID NO: 11762
  oligonucleotide probe

SEQ ID NO: 31325 - DNA, 32 bp, Artificial; identical to SEQ ID NO: 11762
  oligonucleotide probe

SEQ ID NO: 31326 - DNA, 32 bp, Artificial; identical to SEQ ID NO: 11173
  oligonucleotide probe

SEQ ID NO: 31327 - DNA, 32 bp, Artificial; identical to SEQ ID NO: 11173
  oligonucleotide probe

SEQ ID NO: 31328 - DNA, 32 bp, Artificial; identical to SEQ ID NO: 11764
  oligonucleotide probe

SEQ ID NO: 31329 - DNA, 32 bp, Artificial; identical to SEQ ID NO: 11764
  oligonucleotide probe

SEQ ID NO: 31330 - DNA, 32 bp, Artificial; identical to SEQ ID NO: 11770
  oligonucleotide probe

SEQ ID NO: 31331 - DNA, 32 bp, Artificial; identical to SEQ ID NO: 11770
  oligonucleotide probe

SEQ ID NO: 31332 - DNA, 32 bp, Artificial; identical to SEQ ID NO: 11770
  oligonucleotide probe

SEQ ID NO: 31333 - DNA, 32 bp, Artificial; identical to SEQ ID NO: 11770
  oligonucleotide probe

SEQ ID NO: 31334 - DNA, 32 bp, Artificial; identical to SEQ ID NO: 11762
  oligonucleotide probe

SEQ ID NO: 31335 - DNA, 32 bp, Artificial; identical to SEQ ID NO: 11762
  oligonucleotide probe

SEQ ID NO: 31336 - DNA, 32 bp, Artificial; identical to SEQ ID NO: 11762
  oligonucleotide probe

SEQ ID NO: 31337 - DNA, 32 bp, Artificial; identical to SEQ ID NO: 11762
  oligonucleotide probe

SEQ ID NO: 31338 - DNA, 32 bp, Artificial; identical to SEQ ID NO: 11756
  oligonucleotide probe

SEQ ID NO: 31339 - DNA, 32 bp, Artificial; identical to SEQ ID NO: 11756
  oligonucleotide probe

SEQ ID NO: 31340 - DNA, 32 bp, Artificial; identical to SEQ ID NO: 11181
  oligonucleotide probe

SEQ ID NO: 31341 - DNA, 32 bp, Artificial; identical to SEQ ID NO: 11181
  oligonucleotide probe

SEQ ID NO: 31342 - DNA, 32 bp, Artificial; identical to SEQ ID NO: 11762
  oligonucleotide probe

SEQ ID NO: 31343 - DNA, 32 bp, Artificial; identical to SEQ ID NO: 11762
  oligonucleotide probe

SEQ ID NO: 31344 - DNA, 32 bp, Artificial; identical to SEQ ID NO: 11762
  oligonucleotide probe

SEQ ID NO: 31345 - DNA, 32 bp, Artificial; identical to SEQ ID NO: 11762
  oligonucleotide probe

SEQ ID NO: 31346 - DNA, 32 bp, Artificial; identical to SEQ ID NO: 11764
  oligonucleotide probe

SEQ ID NO: 31347 - DNA, 32 bp, Artificial; identical to SEQ ID NO: 11764
  oligonucleotide probe

SEQ ID NO: 31348 - DNA, 32 bp, Artificial; identical to SEQ ID NO: 11770
  oligonucleotide probe

SEQ ID NO: 31349 - DNA, 32 bp, Artificial; identical to SEQ ID NO: 11770
  oligonucleotide probe

SEQ ID NO: 31350 - DNA, 32 bp, Artificial; identical to SEQ ID NO: 11165
  oligonucleotide probe

SEQ ID NO: 31351 - DNA, 32 bp, Artificial; identical to SEQ ID NO: 11165
  oligonucleotide probe

SEQ ID NO: 31352 - DNA, 32 bp, Artificial; identical to SEQ ID NO: 11756
  oligonucleotide probe

SEQ ID NO: 31353 - DNA, 32 bp, Artificial; identical to SEQ ID NO: 11756
  oligonucleotide probe

SEQ ID NO: 31354 - DNA, 32 bp, Artificial; identical to SEQ ID NO: 11756
  oligonucleotide probe

SEQ ID NO: 31355 - DNA, 32 bp, Artificial; identical to SEQ ID NO: 11756
  oligonucleotide probe

SEQ ID NO: 31356 - DNA, 32 bp, Artificial; identical to SEQ ID NO: 11764
  oligonucleotide probe

SEQ ID NO: 31357 - DNA, 32 bp, Artificial; identical to SEQ ID NO: 11764
  oligonucleotide probe

SEQ ID NO: 31358 - DNA, 32 bp, Artificial; identical to SEQ ID NO: 11756
  oligonucleotide probe

SEQ ID NO: 31359 - DNA, 32 bp, Artificial; identical to SEQ ID NO: 11756
  oligonucleotide probe

SEQ ID NO: 31360 - DNA, 32 bp, Artificial; identical to SEQ ID NO: 11177
  oligonucleotide probe

SEQ ID NO: 31361 - DNA, 32 bp, Artificial; identical to SEQ ID NO: 11177
  oligonucleotide probe

SEQ ID NO: 31362 - DNA, 32 bp, Artificial; identical to SEQ ID NO: 11177
  oligonucleotide probe

SEQ ID NO: 31363 - DNA, 32 bp, Artificial; identical to SEQ ID NO: 11177
  oligonucleotide probe

SEQ ID NO: 31364 - DNA, 32 bp, Artificial; identical to SEQ ID NO: 11177
  oligonucleotide probe

SEQ ID NO: 31365 - DNA, 32 bp, Artificial; identical to SEQ ID NO: 11177
  oligonucleotide probe

SEQ ID NO: 31366 - DNA, 32 bp, Artificial; identical to SEQ ID NO: 11764
  oligonucleotide probe

SEQ ID NO: 31367 - DNA, 32 bp, Artificial; identical to SEQ ID NO: 11764
  oligonucleotide probe

SEQ ID NO: 31368 - DNA, 32 bp, Artificial; identical to SEQ ID NO: 11764
  oligonucleotide probe

SEQ ID NO: 31369 - DNA, 32 bp, Artificial; identical to SEQ ID NO: 11764
  oligonucleotide probe

SEQ ID NO: 31370 - DNA, 32 bp, Artificial; identical to SEQ ID NO: 11770
  oligonucleotide probe

SEQ ID NO: 31371 - DNA, 32 bp, Artificial; identical to SEQ ID NO: 11770
  oligonucleotide probe

SEQ ID NO: 31372 - DNA, 32 bp, Artificial; identical to SEQ ID NO: 11171
  oligonucleotide probe

SEQ ID NO: 31373 - DNA, 32 bp, Artificial; identical to SEQ ID NO: 11171
  oligonucleotide probe

SEQ ID NO: 31374 - DNA, 32 bp, Artificial; identical to SEQ ID NO: 11171
  oligonucleotide probe

SEQ ID NO: 31375 - DNA, 32 bp, Artificial; identical to SEQ ID NO: 11171
  oligonucleotide probe

SEQ ID NO: 31376 - DNA, 32 bp, Artificial; identical to SEQ ID NO: 11171
  oligonucleotide probe

SEQ ID NO: 31377 - DNA, 32 bp, Artificial; identical to SEQ ID NO: 11171
  oligonucleotide probe

SEQ ID NO: 31378 - DNA, 32 bp, Artificial; identical to SEQ ID NO: 11756
  oligonucleotide probe

SEQ ID NO: 31379 - DNA, 32 bp, Artificial; identical to SEQ ID NO: 11756
  oligonucleotide probe

SEQ ID NO: 31380 - DNA, 32 bp, Artificial; identical to SEQ ID NO: 11165
  oligonucleotide probe

SEQ ID NO: 31381 - DNA, 32 bp, Artificial; identical to SEQ ID NO: 11165
  oligonucleotide probe

SEQ ID NO: 31382 - DNA, 32 bp, Artificial; identical to SEQ ID NO: 11770
  oligonucleotide probe

SEQ ID NO: 31383 - DNA, 32 bp, Artificial; identical to SEQ ID NO: 11770
  oligonucleotide probe

SEQ ID NO: 31384 - DNA, 32 bp, Artificial; identical to SEQ ID NO: 11185
  oligonucleotide probe

SEQ ID NO: 31385 - DNA, 32 bp, Artificial; identical to SEQ ID NO: 11185
  oligonucleotide probe

SEQ ID NO: 31386 - DNA, 32 bp, Artificial; identical to SEQ ID NO: 11762
  oligonucleotide probe

SEQ ID NO: 31387 - DNA, 32 bp, Artificial; identical to SEQ ID NO: 11762
  oligonucleotide probe

SEQ ID NO: 31388 - DNA, 32 bp, Artificial; identical to SEQ ID NO: 11167
  oligonucleotide probe

SEQ ID NO: 31389 - DNA, 32 bp, Artificial; identical to SEQ ID NO: 11167
  oligonucleotide probe

SEQ ID NO: 31390 - DNA, 32 bp, Artificial; identical to SEQ ID NO: 11177
  oligonucleotide probe

SEQ ID NO: 31391 - DNA, 32 bp, Artificial; identical to SEQ ID NO: 11177
  oligonucleotide probe

SEQ ID NO: 31392 - DNA, 32 bp, Artificial; identical to SEQ ID NO: 11770
  oligonucleotide probe

SEQ ID NO: 31393 - DNA, 32 bp, Artificial; identical to SEQ ID NO: 11770
  oligonucleotide probe

SEQ ID NO: 31394 - DNA, 32 bp, Artificial; identical to SEQ ID NO: 11177
  oligonucleotide probe

SEQ ID NO: 31395 - DNA, 32 bp, Artificial; identical to SEQ ID NO: 11177
  oligonucleotide probe

SEQ ID NO: 31396 - DNA, 32 bp, Artificial; identical to SEQ ID NO: 11177
  oligonucleotide probe

SEQ ID NO: 31397 - DNA, 32 bp, Artificial; identical to SEQ ID NO: 11177
  oligonucleotide probe

SEQ ID NO: 31398 - DNA, 32 bp, Artificial; identical to SEQ ID NO: 11173
  oligonucleotide probe

SEQ ID NO: 31399 - DNA, 32 bp, Artificial; identical to SEQ ID NO: 11173
  oligonucleotide probe

SEQ ID NO: 31400 - DNA, 32 bp, Artificial; identical to SEQ ID NO: 11173
  oligonucleotide probe

SEQ ID NO: 31401 - DNA, 32 bp, Artificial; identical to SEQ ID NO: 11173
  oligonucleotide probe

SEQ ID NO: 31402 - DNA, 32 bp, Artificial; identical to SEQ ID NO: 11756
  oligonucleotide probe

SEQ ID NO: 31403 - DNA, 32 bp, Artificial; identical to SEQ ID NO: 11756
  oligonucleotide probe

SEQ ID NO: 31404 - DNA, 32 bp, Artificial; identical to SEQ ID NO: 11756
  oligonucleotide probe

SEQ ID NO: 31405 - DNA, 32 bp, Artificial; identical to SEQ ID NO: 11756
  oligonucleotide probe

SEQ ID NO: 31406 - DNA, 32 bp, Artificial; identical to SEQ ID NO: 11181
  oligonucleotide probe

SEQ ID NO: 31407 - DNA, 32 bp, Artificial; identical to SEQ ID NO: 11181
  oligonucleotide probe

SEQ ID NO: 31408 - DNA, 32 bp, Artificial; identical to SEQ ID NO: 11770
  oligonucleotide probe

SEQ ID NO: 31409 - DNA, 32 bp, Artificial; identical to SEQ ID NO: 11770
  oligonucleotide probe

SEQ ID NO: 31410 - DNA, 32 bp, Artificial; identical to SEQ ID NO: 11165
  oligonucleotide probe

SEQ ID NO: 31411 - DNA, 32 bp, Artificial; identical to SEQ ID NO: 11165
  oligonucleotide probe

SEQ ID NO: 31412 - DNA, 32 bp, Artificial; identical to SEQ ID NO: 11177
  oligonucleotide probe

SEQ ID NO: 31413 - DNA, 32 bp, Artificial; identical to SEQ ID NO: 11177
  oligonucleotide probe

SEQ ID NO: 31414 - DNA, 32 bp, Artificial; identical to SEQ ID NO: 11167
  oligonucleotide probe

SEQ ID NO: 31415 - DNA, 32 bp, Artificial; identical to SEQ ID NO: 11167
  oligonucleotide probe

SEQ ID NO: 31416 - DNA, 32 bp, Artificial; identical to SEQ ID NO: 11177
  oligonucleotide probe

SEQ ID NO: 31417 - DNA, 32 bp, Artificial; identical to SEQ ID NO: 11177
  oligonucleotide probe

SEQ ID NO: 31418 - DNA, 32 bp, Artificial; identical to SEQ ID NO: 11165
  oligonucleotide probe

SEQ ID NO: 31419 - DNA, 32 bp, Artificial; identical to SEQ ID NO: 11165
  oligonucleotide probe

SEQ ID NO: 31420 - DNA, 32 bp, Artificial; identical to SEQ ID NO: 11764
  oligonucleotide probe

SEQ ID NO: 31421 - DNA, 32 bp, Artificial; identical to SEQ ID NO: 11764
  oligonucleotide probe

SEQ ID NO: 31422 - DNA, 32 bp, Artificial; identical to SEQ ID NO: 11173
  oligonucleotide probe

SEQ ID NO: 31423 - DNA, 32 bp, Artificial; identical to SEQ ID NO: 11173
  oligonucleotide probe

SEQ ID NO: 31424 - DNA, 32 bp, Artificial; identical to SEQ ID NO: 11756
  oligonucleotide probe

SEQ ID NO: 31425 - DNA, 32 bp, Artificial; identical to SEQ ID NO: 11756
  oligonucleotide probe

SEQ ID NO: 31426 - DNA, 32 bp, Artificial; identical to SEQ ID NO: 11163
  oligonucleotide probe

SEQ ID NO: 31427 - DNA, 32 bp, Artificial; identical to SEQ ID NO: 11163
  oligonucleotide probe

SEQ ID NO: 31428 - DNA, 32 bp, Artificial; identical to SEQ ID NO: 11173
  oligonucleotide probe

SEQ ID NO: 31429 - DNA, 32 bp, Artificial; identical to SEQ ID NO: 11173
  oligonucleotide probe

SEQ ID NO: 31430 - DNA, 32 bp, Artificial; identical to SEQ ID NO: 11770
  oligonucleotide probe

SEQ ID NO: 31431 - DNA, 32 bp, Artificial; identical to SEQ ID NO: 11770
  oligonucleotide probe

SEQ ID NO: 31432 - DNA, 32 bp, Artificial; identical to SEQ ID NO: 11171
  oligonucleotide probe

SEQ ID NO: 31433 - DNA, 32 bp, Artificial; identical to SEQ ID NO: 11171
  oligonucleotide probe

SEQ ID NO: 31434 - DNA, 32 bp, Artificial; identical to SEQ ID NO: 11770
  oligonucleotide probe

SEQ ID NO: 31435 - DNA, 32 bp, Artificial; identical to SEQ ID NO: 11770
  oligonucleotide probe

SEQ ID NO: 31436 - DNA, 32 bp, Artificial; identical to SEQ ID NO: 11171
  oligonucleotide probe

SEQ ID NO: 31437 - DNA, 32 bp, Artificial; identical to SEQ ID NO: 11171
  oligonucleotide probe

SEQ ID NO: 31438 - DNA, 32 bp, Artificial; identical to SEQ ID NO: 11185
  oligonucleotide probe

SEQ ID NO: 31439 - DNA, 32 bp, Artificial; identical to SEQ ID NO: 11185
  oligonucleotide probe

SEQ ID NO: 31440 - DNA, 32 bp, Artificial; identical to SEQ ID NO: 11165
  oligonucleotide probe

SEQ ID NO: 31441 - DNA, 32 bp, Artificial; identical to SEQ ID NO: 11165
  oligonucleotide probe

SEQ ID NO: 31442 - DNA, 32 bp, Artificial; identical to SEQ ID NO: 11173
  oligonucleotide probe

SEQ ID NO: 31443 - DNA, 32 bp, Artificial; identical to SEQ ID NO: 11173
  oligonucleotide probe

SEQ ID NO: 31444 - DNA, 32 bp, Artificial; identical to SEQ ID NO: 11185
  oligonucleotide probe

SEQ ID NO: 31445 - DNA, 32 bp, Artificial; identical to SEQ ID NO: 11185
  oligonucleotide probe

SEQ ID NO: 31446 - DNA, 32 bp, Artificial; identical to SEQ ID NO: 11167
  oligonucleotide probe

SEQ ID NO: 31447 - DNA, 32 bp, Artificial; identical to SEQ ID NO: 11167
  oligonucleotide probe

SEQ ID NO: 31448 - DNA, 32 bp, Artificial; identical to SEQ ID NO: 11165
  oligonucleotide probe

SEQ ID NO: 31449 - DNA, 32 bp, Artificial; identical to SEQ ID NO: 11165
  oligonucleotide probe

SEQ ID NO: 31450 - DNA, 32 bp, Artificial; identical to SEQ ID NO: 11185
  oligonucleotide probe

SEQ ID NO: 31451 - DNA, 32 bp, Artificial; identical to SEQ ID NO: 11185
  oligonucleotide probe

SEQ ID NO: 31452 - DNA, 32 bp, Artificial; identical to SEQ ID NO: 11177
  oligonucleotide probe

SEQ ID NO: 31453 - DNA, 32 bp, Artificial; identical to SEQ ID NO: 11177
  oligonucleotide probe

SEQ ID NO: 31454 - DNA, 32 bp, Artificial; identical to SEQ ID NO: 11163
  oligonucleotide probe

SEQ ID NO: 31455 - DNA, 32 bp, Artificial; identical to SEQ ID NO: 11163
  oligonucleotide probe

SEQ ID NO: 31456 - DNA, 32 bp, Artificial; identical to SEQ ID NO: 11171
  oligonucleotide probe

SEQ ID NO: 31457 - DNA, 32 bp, Artificial; identical to SEQ ID NO: 11171
  oligonucleotide probe

SEQ ID NO: 31458 - DNA, 32 bp, Artificial; identical to SEQ ID NO: 11185
  oligonucleotide probe

SEQ ID NO: 31459 - DNA, 32 bp, Artificial; identical to SEQ ID NO: 11185
  oligonucleotide probe

SEQ ID NO: 31460 - DNA, 32 bp, Artificial; identical to SEQ ID NO: 11756
  oligonucleotide probe

SEQ ID NO: 31461 - DNA, 32 bp, Artificial; identical to SEQ ID NO: 11756
  oligonucleotide probe

SEQ ID NO: 31462 - DNA, 32 bp, Artificial; identical to SEQ ID NO: 11770
  oligonucleotide probe

SEQ ID NO: 31463 - DNA, 32 bp, Artificial; identical to SEQ ID NO: 11770
  oligonucleotide probe

SEQ ID NO: 31464 - DNA, 32 bp, Artificial; identical to SEQ ID NO: 11165
  oligonucleotide probe

SEQ ID NO: 31465 - DNA, 32 bp, Artificial; identical to SEQ ID NO: 11165
  oligonucleotide probe

SEQ ID NO: 31466 - DNA, 32 bp, Artificial; identical to SEQ ID NO: 11756
  oligonucleotide probe

SEQ ID NO: 31467 - DNA, 32 bp, Artificial; identical to SEQ ID NO: 11756
  oligonucleotide probe

SEQ ID NO: 31468 - DNA, 32 bp, Artificial; identical to SEQ ID NO: 11770
  oligonucleotide probe

SEQ ID NO: 31469 - DNA, 32 bp, Artificial; identical to SEQ ID NO: 11770
  oligonucleotide probe

SEQ ID NO: 31470 - DNA, 32 bp, Artificial; identical to SEQ ID NO: 11181
  oligonucleotide probe

SEQ ID NO: 31471 - DNA, 32 bp, Artificial; identical to SEQ ID NO: 11181
  oligonucleotide probe

SEQ ID NO: 31472 - DNA, 32 bp, Artificial; identical to SEQ ID NO: 11770
  oligonucleotide probe

SEQ ID NO: 31473 - DNA, 32 bp, Artificial; identical to SEQ ID NO: 11770
  oligonucleotide probe

SEQ ID NO: 31474 - DNA, 32 bp, Artificial; identical to SEQ ID NO: 11770
  oligonucleotide probe

SEQ ID NO: 31475 - DNA, 32 bp, Artificial; identical to SEQ ID NO: 11770
  oligonucleotide probe

SEQ ID NO: 31476 - DNA, 32 bp, Artificial; identical to SEQ ID NO: 11181
  oligonucleotide probe

SEQ ID NO: 31477 - DNA, 32 bp, Artificial; identical to SEQ ID NO: 11181
  oligonucleotide probe

SEQ ID NO: 31478 - DNA, 32 bp, Artificial; identical to SEQ ID NO: 11167
  oligonucleotide probe

SEQ ID NO: 31479 - DNA, 32 bp, Artificial; identical to SEQ ID NO: 11167
  oligonucleotide probe

SEQ ID NO: 31480 - DNA, 32 bp, Artificial; identical to SEQ ID NO: 11762
  oligonucleotide probe

SEQ ID NO: 31481 - DNA, 32 bp, Artificial; identical to SEQ ID NO: 11762
  oligonucleotide probe

SEQ ID NO: 31482 - DNA, 32 bp, Artificial; identical to SEQ ID NO: 11764
  oligonucleotide probe

SEQ ID NO: 31483 - DNA, 32 bp, Artificial; identical to SEQ ID NO: 11764
  oligonucleotide probe

SEQ ID NO: 31484 - DNA, 32 bp, Artificial; identical to SEQ ID NO: 11756
  oligonucleotide probe

SEQ ID NO: 31485 - DNA, 32 bp, Artificial; identical to SEQ ID NO: 11756
  oligonucleotide probe

SEQ ID NO: 31486 - DNA, 32 bp, Artificial; identical to SEQ ID NO: 11762
  oligonucleotide probe

SEQ ID NO: 31487 - DNA, 32 bp, Artificial; identical to SEQ ID NO: 11762
  oligonucleotide probe

SEQ ID NO: 31488 - DNA, 32 bp, Artificial; identical to SEQ ID NO: 11770
  oligonucleotide probe

SEQ ID NO: 31489 - DNA, 32 bp, Artificial; identical to SEQ ID NO: 11770
  oligonucleotide probe

SEQ ID NO: 31490 - DNA, 32 bp, Artificial; identical to SEQ ID NO: 11770
  oligonucleotide probe

SEQ ID NO: 31491 - DNA, 32 bp, Artificial; identical to SEQ ID NO: 11770
  oligonucleotide probe

SEQ ID NO: 31492 - DNA, 32 bp, Artificial; identical to SEQ ID NO: 11171
  oligonucleotide probe

SEQ ID NO: 31493 - DNA, 32 bp, Artificial; identical to SEQ ID NO: 11171
  oligonucleotide probe

SEQ ID NO: 31494 - DNA, 32 bp, Artificial; identical to SEQ ID NO: 11762
  oligonucleotide probe

SEQ ID NO: 31495 - DNA, 32 bp, Artificial; identical to SEQ ID NO: 11762
  oligonucleotide probe

SEQ ID NO: 31496 - DNA, 32 bp, Artificial; identical to SEQ ID NO: 11762
  oligonucleotide probe

SEQ ID NO: 31497 - DNA, 32 bp, Artificial; identical to SEQ ID NO: 11762
  oligonucleotide probe

SEQ ID NO: 31498 - DNA, 32 bp, Artificial; identical to SEQ ID NO: 11173
  oligonucleotide probe

SEQ ID NO: 31499 - DNA, 32 bp, Artificial; identical to SEQ ID NO: 11173
  oligonucleotide probe

SEQ ID NO: 31500 - DNA, 32 bp, Artificial; identical to SEQ ID NO: 11171
  oligonucleotide probe

SEQ ID NO: 31501 - DNA, 32 bp, Artificial; identical to SEQ ID NO: 11171
  oligonucleotide probe

SEQ ID NO: 31502 - DNA, 32 bp, Artificial; identical to SEQ ID NO: 11173
  oligonucleotide probe

SEQ ID NO: 31503 - DNA, 32 bp, Artificial; identical to SEQ ID NO: 11173
  oligonucleotide probe

SEQ ID NO: 31504 - DNA, 32 bp, Artificial; identical to SEQ ID NO: 11185
  oligonucleotide probe

SEQ ID NO: 31505 - DNA, 32 bp, Artificial; identical to SEQ ID NO: 11185
  oligonucleotide probe

SEQ ID NO: 31506 - DNA, 32 bp, Artificial; identical to SEQ ID NO: 11163
  oligonucleotide probe

SEQ ID NO: 31507 - DNA, 32 bp, Artificial; identical to SEQ ID NO: 11163
  oligonucleotide probe

SEQ ID NO: 31508 - DNA, 32 bp, Artificial; identical to SEQ ID NO: 11756
  oligonucleotide probe

SEQ ID NO: 31509 - DNA, 32 bp, Artificial; identical to SEQ ID NO: 11756
  oligonucleotide probe

SEQ ID NO: 31510 - DNA, 32 bp, Artificial; identical to SEQ ID NO: 11167
  oligonucleotide probe

SEQ ID NO: 31511 - DNA, 32 bp, Artificial; identical to SEQ ID NO: 11167
  oligonucleotide probe

SEQ ID NO: 31512 - DNA, 32 bp, Artificial; identical to SEQ ID NO: 11185
  oligonucleotide probe

SEQ ID NO: 31513 - DNA, 32 bp, Artificial; identical to SEQ ID NO: 11185
  oligonucleotide probe

SEQ ID NO: 31514 - DNA, 32 bp, Artificial; identical to SEQ ID NO: 11173
  oligonucleotide probe

SEQ ID NO: 31515 - DNA, 32 bp, Artificial; identical to SEQ ID NO: 11173
  oligonucleotide probe

SEQ ID NO: 31516 - DNA, 32 bp, Artificial; identical to SEQ ID NO: 11167
  oligonucleotide probe

SEQ ID NO: 31517 - DNA, 32 bp, Artificial; identical to SEQ ID NO: 11167
  oligonucleotide probe

SEQ ID NO: 31518 - DNA, 32 bp, Artificial; identical to SEQ ID NO: 11165
  oligonucleotide probe

SEQ ID NO: 31519 - DNA, 32 bp, Artificial; identical to SEQ ID NO: 11165
  oligonucleotide probe

SEQ ID NO: 31520 - DNA, 32 bp, Artificial; identical to SEQ ID NO: 11171
  oligonucleotide probe

SEQ ID NO: 31521 - DNA, 32 bp, Artificial; identical to SEQ ID NO: 11171
  oligonucleotide probe

SEQ ID NO: 31522 - DNA, 32 bp, Artificial; identical to SEQ ID NO: 11764
  oligonucleotide probe

SEQ ID NO: 31523 - DNA, 32 bp, Artificial; identical to SEQ ID NO: 11764
  oligonucleotide probe

SEQ ID NO: 31524 - DNA, 32 bp, Artificial; identical to SEQ ID NO: 11167
  oligonucleotide probe

SEQ ID NO: 31525 - DNA, 32 bp, Artificial; identical to SEQ ID NO: 11167
  oligonucleotide probe

SEQ ID NO: 31526 - DNA, 32 bp, Artificial; identical to SEQ ID NO: 11167
  oligonucleotide probe

SEQ ID NO: 31527 - DNA, 32 bp, Artificial; identical to SEQ ID NO: 11167
  oligonucleotide probe

SEQ ID NO: 31528 - DNA, 32 bp, Artificial; identical to SEQ ID NO: 11762
  oligonucleotide probe

SEQ ID NO: 31529 - DNA, 32 bp, Artificial; identical to SEQ ID NO: 11762
  oligonucleotide probe

SEQ ID NO: 31530 - DNA, 32 bp, Artificial; identical to SEQ ID NO: 11177
  oligonucleotide probe

SEQ ID NO: 31531 - DNA, 32 bp, Artificial; identical to SEQ ID NO: 11177
  oligonucleotide probe

SEQ ID NO: 31532 - DNA, 32 bp, Artificial; identical to SEQ ID NO: 11764
  oligonucleotide probe

SEQ ID NO: 31533 - DNA, 32 bp, Artificial; identical to SEQ ID NO: 11764
  oligonucleotide probe

SEQ ID NO: 31534 - DNA, 32 bp, Artificial; identical to SEQ ID NO: 11762
  oligonucleotide probe

SEQ ID NO: 31535 - DNA, 32 bp, Artificial; identical to SEQ ID NO: 11762
  oligonucleotide probe

SEQ ID NO: 31536 - DNA, 32 bp, Artificial; identical to SEQ ID NO: 11181
  oligonucleotide probe

SEQ ID NO: 31537 - DNA, 32 bp, Artificial; identical to SEQ ID NO: 11181
  oligonucleotide probe

SEQ ID NO: 31538 - DNA, 32 bp, Artificial; identical to SEQ ID NO: 11764
  oligonucleotide probe

SEQ ID NO: 31539 - DNA, 32 bp, Artificial; identical to SEQ ID NO: 11764
  oligonucleotide probe

SEQ ID NO: 31540 - DNA, 32 bp, Artificial; identical to SEQ ID NO: 11181
  oligonucleotide probe

SEQ ID NO: 31541 - DNA, 32 bp, Artificial; identical to SEQ ID NO: 11181
  oligonucleotide probe

SEQ ID NO: 31542 - DNA, 32 bp, Artificial; identical to SEQ ID NO: 11163
  oligonucleotide probe

SEQ ID NO: 31543 - DNA, 32 bp, Artificial; identical to SEQ ID NO: 11163
  oligonucleotide probe

SEQ ID NO: 31544 - DNA, 32 bp, Artificial; identical to SEQ ID NO: 11173
  oligonucleotide probe

SEQ ID NO: 31545 - DNA, 32 bp, Artificial; identical to SEQ ID NO: 11173
  oligonucleotide probe

SEQ ID NO: 31546 - DNA, 32 bp, Artificial; identical to SEQ ID NO: 11762
  oligonucleotide probe

SEQ ID NO: 31547 - DNA, 32 bp, Artificial; identical to SEQ ID NO: 11762
  oligonucleotide probe

SEQ ID NO: 31548 - DNA, 32 bp, Artificial; identical to SEQ ID NO: 11177
  oligonucleotide probe

SEQ ID NO: 31549 - DNA, 32 bp, Artificial; identical to SEQ ID NO: 11177
  oligonucleotide probe

SEQ ID NO: 31550 - DNA, 32 bp, Artificial; identical to SEQ ID NO: 11167
  oligonucleotide probe

SEQ ID NO: 31551 - DNA, 32 bp, Artificial; identical to SEQ ID NO: 11167
  oligonucleotide probe

SEQ ID NO: 31552 - DNA, 32 bp, Artificial; identical to SEQ ID NO: 11764
  oligonucleotide probe

SEQ ID NO: 31553 - DNA, 32 bp, Artificial; identical to SEQ ID NO: 11764
  oligonucleotide probe

SEQ ID NO: 31554 - DNA, 32 bp, Artificial; identical to SEQ ID NO: 11756
  oligonucleotide probe

SEQ ID NO: 31555 - DNA, 32 bp, Artificial; identical to SEQ ID NO: 11756
  oligonucleotide probe

SEQ ID NO: 31556 - DNA, 32 bp, Artificial; identical to SEQ ID NO: 11185
  oligonucleotide probe

SEQ ID NO: 31557 - DNA, 32 bp, Artificial; identical to SEQ ID NO: 11185
  oligonucleotide probe

SEQ ID NO: 31558 - DNA, 32 bp, Artificial; identical to SEQ ID NO: 11764
  oligonucleotide probe

SEQ ID NO: 31559 - DNA, 32 bp, Artificial; identical to SEQ ID NO: 11764
  oligonucleotide probe

SEQ ID NO: 31560 - DNA, 32 bp, Artificial; identical to SEQ ID NO: 11163
  oligonucleotide probe

SEQ ID NO: 31561 - DNA, 32 bp, Artificial; identical to SEQ ID NO: 11163
  oligonucleotide probe

SEQ ID NO: 31562 - DNA, 32 bp, Artificial; identical to SEQ ID NO: 11181
  oligonucleotide probe

SEQ ID NO: 31563 - DNA, 32 bp, Artificial; identical to SEQ ID NO: 11181
  oligonucleotide probe

SEQ ID NO: 31564 - DNA, 32 bp, Artificial; identical to SEQ ID NO: 11762
  oligonucleotide probe

SEQ ID NO: 31565 - DNA, 32 bp, Artificial; identical to SEQ ID NO: 11762
  oligonucleotide probe

SEQ ID NO: 31566 - DNA, 32 bp, Artificial; identical to SEQ ID NO: 11163
  oligonucleotide probe

SEQ ID NO: 31567 - DNA, 32 bp, Artificial; identical to SEQ ID NO: 11163
  oligonucleotide probe

SEQ ID NO: 31568 - DNA, 32 bp, Artificial; identical to SEQ ID NO: 11171
  oligonucleotide probe

SEQ ID NO: 31569 - DNA, 32 bp, Artificial; identical to SEQ ID NO: 11171
  oligonucleotide probe

SEQ ID NO: 31570 - DNA, 32 bp, Artificial; identical to SEQ ID NO: 11764
  oligonucleotide probe

SEQ ID NO: 31571 - DNA, 32 bp, Artificial; identical to SEQ ID NO: 11764
  oligonucleotide probe

SEQ ID NO: 31572 - DNA, 32 bp, Artificial; identical to SEQ ID NO: 11177
  oligonucleotide probe

SEQ ID NO: 31573 - DNA, 32 bp, Artificial; identical to SEQ ID NO: 11177
  oligonucleotide probe

SEQ ID NO: 31574 - DNA, 32 bp, Artificial; identical to SEQ ID NO: 11165
  oligonucleotide probe

SEQ ID NO: 31575 - DNA, 32 bp, Artificial; identical to SEQ ID NO: 11165
  oligonucleotide probe

SEQ ID NO: 31576 - DNA, 32 bp, Artificial; identical to SEQ ID NO: 11173
  oligonucleotide probe

SEQ ID NO: 31577 - DNA, 32 bp, Artificial; identical to SEQ ID NO: 11173
  oligonucleotide probe

SEQ ID NO: 31578 - DNA, 32 bp, Artificial; identical to SEQ ID NO: 11762
  oligonucleotide probe

SEQ ID NO: 31579 - DNA, 32 bp, Artificial; identical to SEQ ID NO: 11762
  oligonucleotide probe

SEQ ID NO: 31580 - DNA, 32 bp, Artificial; identical to SEQ ID NO: 11756
  oligonucleotide probe

SEQ ID NO: 31581 - DNA, 32 bp, Artificial; identical to SEQ ID NO: 11756
  oligonucleotide probe

SEQ ID NO: 31582 - DNA, 32 bp, Artificial; identical to SEQ ID NO: 11165
  oligonucleotide probe

SEQ ID NO: 31583 - DNA, 32 bp, Artificial; identical to SEQ ID NO: 11165
  oligonucleotide probe

SEQ ID NO: 31584 - DNA, 32 bp, Artificial; identical to SEQ ID NO: 11185
  oligonucleotide probe

SEQ ID NO: 31585 - DNA, 32 bp, Artificial; identical to SEQ ID NO: 11185
  oligonucleotide probe

SEQ ID NO: 31586 - DNA, 32 bp, Artificial; identical to SEQ ID NO: 11185
  oligonucleotide probe

SEQ ID NO: 31587 - DNA, 32 bp, Artificial; identical to SEQ ID NO: 11185
  oligonucleotide probe

SEQ ID NO: 31588 - DNA, 32 bp, Artificial; identical to SEQ ID NO: 11756
  oligonucleotide probe

SEQ ID NO: 31589 - DNA, 32 bp, Artificial; identical to SEQ ID NO: 11756
  oligonucleotide probe

SEQ ID NO: 31590 - DNA, 32 bp, Artificial; identical to SEQ ID NO: 11756
  oligonucleotide probe

SEQ ID NO: 31591 - DNA, 32 bp, Artificial; identical to SEQ ID NO: 11756
  oligonucleotide probe

SEQ ID NO: 31592 - DNA, 32 bp, Artificial; identical to SEQ ID NO: 11163
  oligonucleotide probe

SEQ ID NO: 31593 - DNA, 32 bp, Artificial; identical to SEQ ID NO: 11163
  oligonucleotide probe

SEQ ID NO: 31594 - DNA, 32 bp, Artificial; identical to SEQ ID NO: 11756
  oligonucleotide probe

SEQ ID NO: 31595 - DNA, 32 bp, Artificial; identical to SEQ ID NO: 11756
  oligonucleotide probe

SEQ ID NO: 31596 - DNA, 32 bp, Artificial; identical to SEQ ID NO: 11764
  oligonucleotide probe

SEQ ID NO: 31597 - DNA, 32 bp, Artificial; identical to SEQ ID NO: 11764
  oligonucleotide probe

SEQ ID NO: 31598 - DNA, 32 bp, Artificial; identical to SEQ ID NO: 11770
  oligonucleotide probe

SEQ ID NO: 31599 - DNA, 32 bp, Artificial; identical to SEQ ID NO: 11770
  oligonucleotide probe

SEQ ID NO: 31600 - DNA, 32 bp, Artificial; identical to SEQ ID NO: 11163
  oligonucleotide probe

SEQ ID NO: 31601 - DNA, 32 bp, Artificial; identical to SEQ ID NO: 11163
  oligonucleotide probe

SEQ ID NO: 31602 - DNA, 32 bp, Artificial; identical to SEQ ID NO: 11163
  oligonucleotide probe

SEQ ID NO: 31603 - DNA, 32 bp, Artificial; identical to SEQ ID NO: 11163
  oligonucleotide probe

SEQ ID NO: 31604 - DNA, 32 bp, Artificial; identical to SEQ ID NO: 11764
  oligonucleotide probe

SEQ ID NO: 31605 - DNA, 32 bp, Artificial; identical to SEQ ID NO: 11764
  oligonucleotide probe

SEQ ID NO: 31606 - DNA, 32 bp, Artificial; identical to SEQ ID NO: 11762
  oligonucleotide probe

SEQ ID NO: 31607 - DNA, 32 bp, Artificial; identical to SEQ ID NO: 11762
  oligonucleotide probe

SEQ ID NO: 31608 - DNA, 32 bp, Artificial; identical to SEQ ID NO: 11770
  oligonucleotide probe

SEQ ID NO: 31609 - DNA, 32 bp, Artificial; identical to SEQ ID NO: 11770
  oligonucleotide probe

SEQ ID NO: 31610 - DNA, 32 bp, Artificial; identical to SEQ ID NO: 11770
  oligonucleotide probe

SEQ ID NO: 31611 - DNA, 32 bp, Artificial; identical to SEQ ID NO: 11770
  oligonucleotide probe

SEQ ID NO: 31612 - DNA, 32 bp, Artificial; identical to SEQ ID NO: 11764
  oligonucleotide probe

SEQ ID NO: 31613 - DNA, 32 bp, Artificial; identical to SEQ ID NO: 11764
  oligonucleotide probe

SEQ ID NO: 31614 - DNA, 32 bp, Artificial; identical to SEQ ID NO: 11770
  oligonucleotide probe

SEQ ID NO: 31615 - DNA, 32 bp, Artificial; identical to SEQ ID NO: 11756
  oligonucleotide probe

SEQ ID NO: 31616 - DNA, 32 bp, Artificial; identical to SEQ ID NO: 11764
  oligonucleotide probe

SEQ ID NO: 31617 - DNA, 32 bp, Artificial; identical to SEQ ID NO: 11762
  oligonucleotide probe

SEQ ID NO: 31618 - DNA, 32 bp, Artificial; identical to SEQ ID NO: 7659
  oligonucleotide probe

SEQ ID NO: 31619 - DNA, 32 bp, Artificial; identical to SEQ ID NO: 7659
  oligonucleotide probe

SEQ ID NO: 31620 - DNA, 32 bp, Artificial; identical to SEQ ID NO: 5185
  oligonucleotide probe

SEQ ID NO: 31621 - DNA, 32 bp, Artificial; identical to SEQ ID NO: 5185
  oligonucleotide probe

SEQ ID NO: 31622 - DNA, 32 bp, Artificial; identical to SEQ ID NO: 7605
  oligonucleotide probe

SEQ ID NO: 31623 - DNA, 32 bp, Artificial; identical to SEQ ID NO: 7605
  oligonucleotide probe

SEQ ID NO: 31624 - DNA, 32 bp, Artificial; identical to SEQ ID NO: 7833
  oligonucleotide probe

SEQ ID NO: 31625 - DNA, 32 bp, Artificial; identical to SEQ ID NO: 7833
  oligonucleotide probe

SEQ ID NO: 31626 - DNA, 32 bp, Artificial; identical to SEQ ID NO: 5239
  oligonucleotide probe

SEQ ID NO: 31627 - DNA, 32 bp, Artificial; identical to SEQ ID NO: 5239
  oligonucleotide probe

SEQ ID NO: 31628 - DNA, 32 bp, Artificial; identical to SEQ ID NO: 5141
  oligonucleotide probe

SEQ ID NO: 31629 - DNA, 32 bp, Artificial; identical to SEQ ID NO: 5141
  oligonucleotide probe

SEQ ID NO: 31630 - DNA, 32 bp, Artificial; identical to SEQ ID NO: 5217
  oligonucleotide probe

SEQ ID NO: 31631 - DNA, 32 bp, Artificial; identical to SEQ ID NO: 5217
  oligonucleotide probe

SEQ ID NO: 31632 - DNA, 32 bp, Artificial; identical to SEQ ID NO: 7812
  oligonucleotide probe

SEQ ID NO: 31633 - DNA, 32 bp, Artificial; identical to SEQ ID NO: 7812
  oligonucleotide probe

SEQ ID NO: 31634 - DNA, 32 bp, Artificial; identical to SEQ ID NO: 7596
  oligonucleotide probe

SEQ ID NO: 31635 - DNA, 32 bp, Artificial; identical to SEQ ID NO: 7596
  oligonucleotide probe

SEQ ID NO: 31636 - DNA, 32 bp, Artificial; identical to SEQ ID NO: 7676
  oligonucleotide probe

SEQ ID NO: 31637 - DNA, 32 bp, Artificial; identical to SEQ ID NO: 7676
  oligonucleotide probe

SEQ ID NO: 31638 - DNA, 32 bp, Artificial; identical to SEQ ID NO: 7676
  oligonucleotide probe

SEQ ID NO: 31639 - DNA, 32 bp, Artificial; identical to SEQ ID NO: 7676
  oligonucleotide probe

SEQ ID NO: 31640 - DNA, 32 bp, Artificial; identical to SEQ ID NO: 8467
  oligonucleotide probe

SEQ ID NO: 31641 - DNA, 32 bp, Artificial; identical to SEQ ID NO: 8467
  oligonucleotide probe

SEQ ID NO: 31642 - DNA, 32 bp, Artificial; identical to SEQ ID NO: 8796
  oligonucleotide probe

SEQ ID NO: 31643 - DNA, 32 bp, Artificial; identical to SEQ ID NO: 8796
  oligonucleotide probe

SEQ ID NO: 31644 - DNA, 32 bp, Artificial; identical to SEQ ID NO: 7891
  oligonucleotide probe

SEQ ID NO: 31645 - DNA, 32 bp, Artificial; identical to SEQ ID NO: 7891
  oligonucleotide probe

SEQ ID NO: 31646 - DNA, 32 bp, Artificial; identical to SEQ ID NO: 7605
  oligonucleotide probe

SEQ ID NO: 31647 - DNA, 32 bp, Artificial; identical to SEQ ID NO: 7605
  oligonucleotide probe

SEQ ID NO: 31648 - DNA, 32 bp, Artificial; identical to SEQ ID NO: 7596
  oligonucleotide probe

SEQ ID NO: 31649 - DNA, 32 bp, Artificial; identical to SEQ ID NO: 7596
  oligonucleotide probe

SEQ ID NO: 31650 - DNA, 32 bp, Artificial; identical to SEQ ID NO: 5163
  oligonucleotide probe

SEQ ID NO: 31651 - DNA, 32 bp, Artificial; identical to SEQ ID NO: 5163
  oligonucleotide probe

SEQ ID NO: 31652 - DNA, 32 bp, Artificial; identical to SEQ ID NO: 7863
  oligonucleotide probe

SEQ ID NO: 31653 - DNA, 32 bp, Artificial; identical to SEQ ID NO: 7863
  oligonucleotide probe

SEQ ID NO: 31654 - DNA, 32 bp, Artificial; identical to SEQ ID NO: 7891
  oligonucleotide probe

SEQ ID NO: 31655 - DNA, 32 bp, Artificial; identical to SEQ ID NO: 7891
  oligonucleotide probe

SEQ ID NO: 31656 - DNA, 32 bp, Artificial; identical to SEQ ID NO: 5163
  oligonucleotide probe

SEQ ID NO: 31657 - DNA, 32 bp, Artificial; identical to SEQ ID NO: 5163
  oligonucleotide probe

SEQ ID NO: 31658 - DNA, 32 bp, Artificial; identical to SEQ ID NO: 7596
  oligonucleotide probe

SEQ ID NO: 31659 - DNA, 32 bp, Artificial; identical to SEQ ID NO: 7596
  oligonucleotide probe

SEQ ID NO: 31660 - DNA, 32 bp, Artificial; identical to SEQ ID NO: 7863
  oligonucleotide probe

SEQ ID NO: 31661 - DNA, 32 bp, Artificial; identical to SEQ ID NO: 7863
  oligonucleotide probe

SEQ ID NO: 31662 - DNA, 32 bp, Artificial; identical to SEQ ID NO: 7856
  oligonucleotide probe

SEQ ID NO: 31663 - DNA, 32 bp, Artificial; identical to SEQ ID NO: 7856
  oligonucleotide probe

SEQ ID NO: 31664 - DNA, 32 bp, Artificial; identical to SEQ ID NO: 7676
  oligonucleotide probe

SEQ ID NO: 31665 - DNA, 32 bp, Artificial; identical to SEQ ID NO: 7676
  oligonucleotide probe

SEQ ID NO: 31666 - DNA, 32 bp, Artificial; identical to SEQ ID NO: 5163
  oligonucleotide probe

SEQ ID NO: 31667 - DNA, 32 bp, Artificial; identical to SEQ ID NO: 5163
  oligonucleotide probe

SEQ ID NO: 31668 - DNA, 32 bp, Artificial; identical to SEQ ID NO: 8047
  oligonucleotide probe

SEQ ID NO: 31669 - DNA, 32 bp, Artificial; identical to SEQ ID NO: 8047
  oligonucleotide probe

SEQ ID NO: 31670 - DNA, 32 bp, Artificial; identical to SEQ ID NO: 7655
  oligonucleotide probe

SEQ ID NO: 31671 - DNA, 32 bp, Artificial; identical to SEQ ID NO: 7655
  oligonucleotide probe

SEQ ID NO: 31672 - DNA, 32 bp, Artificial; identical to SEQ ID NO: 5160
  oligonucleotide probe

SEQ ID NO: 31673 - DNA, 32 bp, Artificial; identical to SEQ ID NO: 5160
  oligonucleotide probe

SEQ ID NO: 31674 - DNA, 32 bp, Artificial; identical to SEQ ID NO: 7673
  oligonucleotide probe

SEQ ID NO: 31675 - DNA, 32 bp, Artificial; identical to SEQ ID NO: 7673
  oligonucleotide probe

SEQ ID NO: 31676 - DNA, 32 bp, Artificial; identical to SEQ ID NO: 7605
  oligonucleotide probe

SEQ ID NO: 31677 - DNA, 32 bp, Artificial; identical to SEQ ID NO: 7605
  oligonucleotide probe

SEQ ID NO: 31678 - DNA, 32 bp, Artificial; identical to SEQ ID NO: 5133
  oligonucleotide probe

SEQ ID NO: 31679 - DNA, 32 bp, Artificial; identical to SEQ ID NO: 5133
  oligonucleotide probe

SEQ ID NO: 31680 - DNA, 32 bp, Artificial; identical to SEQ ID NO: 5141
  oligonucleotide probe

SEQ ID NO: 31681 - DNA, 32 bp, Artificial; identical to SEQ ID NO: 5141
  oligonucleotide probe

SEQ ID NO: 31682 - DNA, 32 bp, Artificial; identical to SEQ ID NO: 5185
  oligonucleotide probe

SEQ ID NO: 31683 - DNA, 32 bp, Artificial; identical to SEQ ID NO: 5185
  oligonucleotide probe

SEQ ID NO: 31684 - DNA, 32 bp, Artificial; identical to SEQ ID NO: 8467
  oligonucleotide probe

SEQ ID NO: 31685 - DNA, 32 bp, Artificial; identical to SEQ ID NO: 8467
  oligonucleotide probe

SEQ ID NO: 31686 - DNA, 32 bp, Artificial; identical to SEQ ID NO: 5217
  oligonucleotide probe

SEQ ID NO: 31687 - DNA, 32 bp, Artificial; identical to SEQ ID NO: 5217
  oligonucleotide probe

SEQ ID NO: 31688 - DNA, 32 bp, Artificial; identical to SEQ ID NO: 7947
  oligonucleotide probe

SEQ ID NO: 31689 - DNA, 32 bp, Artificial; identical to SEQ ID NO: 7947
  oligonucleotide probe

SEQ ID NO: 31690 - DNA, 32 bp, Artificial; identical to SEQ ID NO: 8247
  oligonucleotide probe

SEQ ID NO: 31691 - DNA, 32 bp, Artificial; identical to SEQ ID NO: 8247
  oligonucleotide probe

SEQ ID NO: 31692 - DNA, 32 bp, Artificial; identical to SEQ ID NO: 5223
  oligonucleotide probe

SEQ ID NO: 31693 - DNA, 32 bp, Artificial; identical to SEQ ID NO: 5223
  oligonucleotide probe

SEQ ID NO: 31694 - DNA, 32 bp, Artificial; identical to SEQ ID NO: 8240
  oligonucleotide probe

SEQ ID NO: 31695 - DNA, 32 bp, Artificial; identical to SEQ ID NO: 8240
  oligonucleotide probe

SEQ ID NO: 31696 - DNA, 32 bp, Artificial; identical to SEQ ID NO: 7694
  oligonucleotide probe

SEQ ID NO: 31697 - DNA, 32 bp, Artificial; identical to SEQ ID NO: 7694
  oligonucleotide probe

SEQ ID NO: 31698 - DNA, 32 bp, Artificial; identical to SEQ ID NO: 7948
  oligonucleotide probe

SEQ ID NO: 31699 - DNA, 32 bp, Artificial; identical to SEQ ID NO: 7948
  oligonucleotide probe

SEQ ID NO: 31700 - DNA, 32 bp, Artificial; identical to SEQ ID NO: 7856
  oligonucleotide probe

SEQ ID NO: 31701 - DNA, 32 bp, Artificial; identical to SEQ ID NO: 7856
  oligonucleotide probe

SEQ ID NO: 31702 - DNA, 32 bp, Artificial; identical to SEQ ID NO: 5136
  oligonucleotide probe

SEQ ID NO: 31703 - DNA, 32 bp, Artificial; identical to SEQ ID NO: 5136
  oligonucleotide probe

SEQ ID NO: 31704 - DNA, 32 bp, Artificial; identical to SEQ ID NO: 7655
  oligonucleotide probe

SEQ ID NO: 31705 - DNA, 32 bp, Artificial; identical to SEQ ID NO: 7655
  oligonucleotide probe

SEQ ID NO: 31706 - DNA, 32 bp, Artificial; identical to SEQ ID NO: 7855
  oligonucleotide probe

SEQ ID NO: 31707 - DNA, 32 bp, Artificial; identical to SEQ ID NO: 7855
  oligonucleotide probe

SEQ ID NO: 31708 - DNA, 32 bp, Artificial; identical to SEQ ID NO: 7856
  oligonucleotide probe

SEQ ID NO: 31709 - DNA, 32 bp, Artificial; identical to SEQ ID NO: 7856
  oligonucleotide probe

SEQ ID NO: 31710 - DNA, 32 bp, Artificial; identical to SEQ ID NO: 5240
  oligonucleotide probe

SEQ ID NO: 31711 - DNA, 32 bp, Artificial; identical to SEQ ID NO: 5240
  oligonucleotide probe

SEQ ID NO: 31712 - DNA, 32 bp, Artificial; identical to SEQ ID NO: 7662
  oligonucleotide probe

SEQ ID NO: 31713 - DNA, 32 bp, Artificial; identical to SEQ ID NO: 7662
  oligonucleotide probe

SEQ ID NO: 31714 - DNA, 32 bp, Artificial; identical to SEQ ID NO: 7835
  oligonucleotide probe

SEQ ID NO: 31715 - DNA, 32 bp, Artificial; identical to SEQ ID NO: 7835
  oligonucleotide probe

SEQ ID NO: 31716 - DNA, 32 bp, Artificial; identical to SEQ ID NO: 7594
  oligonucleotide probe

SEQ ID NO: 31717 - DNA, 32 bp, Artificial; identical to SEQ ID NO: 7594
  oligonucleotide probe

SEQ ID NO: 31718 - DNA, 32 bp, Artificial; identical to SEQ ID NO: 7812
  oligonucleotide probe

SEQ ID NO: 31719 - DNA, 32 bp, Artificial; identical to SEQ ID NO: 7812
  oligonucleotide probe

SEQ ID NO: 31720 - DNA, 32 bp, Artificial; identical to SEQ ID NO: 7594
  oligonucleotide probe

SEQ ID NO: 31721 - DNA, 32 bp, Artificial; identical to SEQ ID NO: 7594
  oligonucleotide probe

SEQ ID NO: 31722 - DNA, 32 bp, Artificial; identical to SEQ ID NO: 7605
  oligonucleotide probe

SEQ ID NO: 31723 - DNA, 32 bp, Artificial; identical to SEQ ID NO: 7605
  oligonucleotide probe

SEQ ID NO: 31724 - DNA, 32 bp, Artificial; identical to SEQ ID NO: 7594
  oligonucleotide probe

SEQ ID NO: 31725 - DNA, 32 bp, Artificial; identical to SEQ ID NO: 7594
  oligonucleotide probe

SEQ ID NO: 31726 - DNA, 32 bp, Artificial; identical to SEQ ID NO: 7863
  oligonucleotide probe

SEQ ID NO: 31727 - DNA, 32 bp, Artificial; identical to SEQ ID NO: 7863
  oligonucleotide probe

SEQ ID NO: 31728 - DNA, 32 bp, Artificial; identical to SEQ ID NO: 7812
  oligonucleotide probe

SEQ ID NO: 31729 - DNA, 32 bp, Artificial; identical to SEQ ID NO: 7812
  oligonucleotide probe

SEQ ID NO: 31730 - DNA, 32 bp, Artificial; identical to SEQ ID NO: 7676
  oligonucleotide probe

SEQ ID NO: 31731 - DNA, 32 bp, Artificial; identical to SEQ ID NO: 7676
  oligonucleotide probe

SEQ ID NO: 31732 - DNA, 32 bp, Artificial; identical to SEQ ID NO: 7840
  oligonucleotide probe

SEQ ID NO: 31733 - DNA, 32 bp, Artificial; identical to SEQ ID NO: 7840
  oligonucleotide probe

SEQ ID NO: 31734 - DNA, 32 bp, Artificial; identical to SEQ ID NO: 5232
  oligonucleotide probe

SEQ ID NO: 31735 - DNA, 32 bp, Artificial; identical to SEQ ID NO: 5232
  oligonucleotide probe

SEQ ID NO: 31736 - DNA, 32 bp, Artificial; identical to SEQ ID NO: 5163
  oligonucleotide probe

SEQ ID NO: 31737 - DNA, 32 bp, Artificial; identical to SEQ ID NO: 5163
  oligonucleotide probe

SEQ ID NO: 31738 - DNA, 32 bp, Artificial; identical to SEQ ID NO: 5185
  oligonucleotide probe

SEQ ID NO: 31739 - DNA, 32 bp, Artificial; identical to SEQ ID NO: 5185
  oligonucleotide probe

SEQ ID NO: 31740 - DNA, 32 bp, Artificial; identical to SEQ ID NO: 7812
  oligonucleotide probe

SEQ ID NO: 31741 - DNA, 32 bp, Artificial; identical to SEQ ID NO: 7812
  oligonucleotide probe

SEQ ID NO: 31742 - DNA, 32 bp, Artificial; identical to SEQ ID NO: 8240
  oligonucleotide probe

SEQ ID NO: 31743 - DNA, 32 bp, Artificial; identical to SEQ ID NO: 8240
  oligonucleotide probe

SEQ ID NO: 31744 - DNA, 32 bp, Artificial; identical to SEQ ID NO: 7624
  oligonucleotide probe

SEQ ID NO: 31745 - DNA, 32 bp, Artificial; identical to SEQ ID NO: 7624
  oligonucleotide probe

SEQ ID NO: 31746 - DNA, 32 bp, Artificial; identical to SEQ ID NO: 7623
  oligonucleotide probe

SEQ ID NO: 31747 - DNA, 32 bp, Artificial; identical to SEQ ID NO: 7623
  oligonucleotide probe

SEQ ID NO: 31748 - DNA, 32 bp, Artificial; identical to SEQ ID NO: 7598
  oligonucleotide probe

SEQ ID NO: 31749 - DNA, 32 bp, Artificial; identical to SEQ ID NO: 7598
  oligonucleotide probe

SEQ ID NO: 31750 - DNA, 32 bp, Artificial; identical to SEQ ID NO: 7623
  oligonucleotide probe

SEQ ID NO: 31751 - DNA, 32 bp, Artificial; identical to SEQ ID NO: 7623
  oligonucleotide probe

SEQ ID NO: 31752 - DNA, 32 bp, Artificial; identical to SEQ ID NO: 7655
  oligonucleotide probe

SEQ ID NO: 31753 - DNA, 32 bp, Artificial; identical to SEQ ID NO: 7655
  oligonucleotide probe

SEQ ID NO: 31754 - DNA, 32 bp, Artificial; identical to SEQ ID NO: 7644
  oligonucleotide probe

SEQ ID NO: 31755 - DNA, 32 bp, Artificial; identical to SEQ ID NO: 7644
  oligonucleotide probe

SEQ ID NO: 31756 - DNA, 32 bp, Artificial; identical to SEQ ID NO: 7598
  oligonucleotide probe

SEQ ID NO: 31757 - DNA, 32 bp, Artificial; identical to SEQ ID NO: 7598
  oligonucleotide probe

SEQ ID NO: 31758 - DNA, 32 bp, Artificial; identical to SEQ ID NO: 7673
  oligonucleotide probe

SEQ ID NO: 31759 - DNA, 32 bp, Artificial; identical to SEQ ID NO: 7673
  oligonucleotide probe

SEQ ID NO: 31760 - DNA, 32 bp, Artificial; identical to SEQ ID NO: 7947
  oligonucleotide probe

SEQ ID NO: 31761 - DNA, 32 bp, Artificial; identical to SEQ ID NO: 7947
  oligonucleotide probe

SEQ ID NO: 31762 - DNA, 32 bp, Artificial; identical to SEQ ID NO: 7676
  oligonucleotide probe

SEQ ID NO: 31763 - DNA, 32 bp, Artificial; identical to SEQ ID NO: 7676
  oligonucleotide probe

SEQ ID NO: 31764 - DNA, 32 bp, Artificial; identical to SEQ ID NO: 7842
  oligonucleotide probe

SEQ ID NO: 31765 - DNA, 32 bp, Artificial; identical to SEQ ID NO: 7842
  oligonucleotide probe

SEQ ID NO: 31766 - DNA, 32 bp, Artificial; identical to SEQ ID NO: 7644
  oligonucleotide probe

SEQ ID NO: 31767 - DNA, 32 bp, Artificial; identical to SEQ ID NO: 7644
  oligonucleotide probe

SEQ ID NO: 31768 - DNA, 32 bp, Artificial; identical to SEQ ID NO: 8442
  oligonucleotide probe

SEQ ID NO: 31769 - DNA, 32 bp, Artificial; identical to SEQ ID NO: 8442
  oligonucleotide probe

SEQ ID NO: 31770 - DNA, 32 bp, Artificial; identical to SEQ ID NO: 5171
  oligonucleotide probe

SEQ ID NO: 31771 - DNA, 32 bp, Artificial; identical to SEQ ID NO: 5171
  oligonucleotide probe

SEQ ID NO: 31772 - DNA, 32 bp, Artificial; identical to SEQ ID NO: 7623
  oligonucleotide probe

SEQ ID NO: 31773 - DNA, 32 bp, Artificial; identical to SEQ ID NO: 7623
  oligonucleotide probe

SEQ ID NO: 31774 - DNA, 32 bp, Artificial; identical to SEQ ID NO: 7662
  oligonucleotide probe

SEQ ID NO: 31775 - DNA, 32 bp, Artificial; identical to SEQ ID NO: 7662
  oligonucleotide probe

SEQ ID NO: 31776 - DNA, 32 bp, Artificial; identical to SEQ ID NO: 7676
  oligonucleotide probe

SEQ ID NO: 31777 - DNA, 32 bp, Artificial; identical to SEQ ID NO: 7676
  oligonucleotide probe

SEQ ID NO: 31778 - DNA, 32 bp, Artificial; identical to SEQ ID NO: 5217
  oligonucleotide probe

SEQ ID NO: 31779 - DNA, 32 bp, Artificial; identical to SEQ ID NO: 5217
  oligonucleotide probe

SEQ ID NO: 31780 - DNA, 32 bp, Artificial; identical to SEQ ID NO: 7948
  oligonucleotide probe

SEQ ID NO: 31781 - DNA, 32 bp, Artificial; identical to SEQ ID NO: 7948
  oligonucleotide probe

SEQ ID NO: 31782 - DNA, 32 bp, Artificial; identical to SEQ ID NO: 7855
  oligonucleotide probe

SEQ ID NO: 31783 - DNA, 32 bp, Artificial; identical to SEQ ID NO: 7855
  oligonucleotide probe

SEQ ID NO: 31784 - DNA, 32 bp, Artificial; identical to SEQ ID NO: 5136
  oligonucleotide probe

SEQ ID NO: 31785 - DNA, 32 bp, Artificial; identical to SEQ ID NO: 5136
  oligonucleotide probe

SEQ ID NO: 31786 - DNA, 32 bp, Artificial; identical to SEQ ID NO: 7594
  oligonucleotide probe

SEQ ID NO: 31787 - DNA, 32 bp, Artificial; identical to SEQ ID NO: 7594
  oligonucleotide probe

SEQ ID NO: 31788 - DNA, 32 bp, Artificial; identical to SEQ ID NO: 7673
  oligonucleotide probe

SEQ ID NO: 31789 - DNA, 32 bp, Artificial; identical to SEQ ID NO: 7673
  oligonucleotide probe

SEQ ID NO: 31790 - DNA, 32 bp, Artificial; identical to SEQ ID NO: 5224
  oligonucleotide probe

SEQ ID NO: 31791 - DNA, 32 bp, Artificial; identical to SEQ ID NO: 5224
  oligonucleotide probe

SEQ ID NO: 31792 - DNA, 32 bp, Artificial; identical to SEQ ID NO: 8247
  oligonucleotide probe

SEQ ID NO: 31793 - DNA, 32 bp, Artificial; identical to SEQ ID NO: 8247
  oligonucleotide probe

SEQ ID NO: 31794 - DNA, 32 bp, Artificial; identical to SEQ ID NO: 7676
  oligonucleotide probe

SEQ ID NO: 31795 - DNA, 32 bp, Artificial; identical to SEQ ID NO: 7676
  oligonucleotide probe

SEQ ID NO: 31796 - DNA, 32 bp, Artificial; identical to SEQ ID NO: 7866
  oligonucleotide probe

SEQ ID NO: 31797 - DNA, 32 bp, Artificial; identical to SEQ ID NO: 7866
  oligonucleotide probe

SEQ ID NO: 31798 - DNA, 32 bp, Artificial; identical to SEQ ID NO: 7596
  oligonucleotide probe

SEQ ID NO: 31799 - DNA, 32 bp, Artificial; identical to SEQ ID NO: 7596
  oligonucleotide probe

SEQ ID NO: 31800 - DNA, 32 bp, Artificial; identical to SEQ ID NO: 7783
  oligonucleotide probe

SEQ ID NO: 31801 - DNA, 32 bp, Artificial; identical to SEQ ID NO: 7783
  oligonucleotide probe

SEQ ID NO: 31802 - DNA, 32 bp, Artificial; identical to SEQ ID NO: 7855
  oligonucleotide probe

SEQ ID NO: 31803 - DNA, 32 bp, Artificial; identical to SEQ ID NO: 7855
  oligonucleotide probe

SEQ ID NO: 31804 - DNA, 32 bp, Artificial; identical to SEQ ID NO: 5163
  oligonucleotide probe

SEQ ID NO: 31805 - DNA, 32 bp, Artificial; identical to SEQ ID NO: 5163
  oligonucleotide probe

SEQ ID NO: 31806 - DNA, 32 bp, Artificial; identical to SEQ ID NO: 5163
  oligonucleotide probe

SEQ ID NO: 31807 - DNA, 32 bp, Artificial; identical to SEQ ID NO: 5163
  oligonucleotide probe

SEQ ID NO: 31808 - DNA, 32 bp, Artificial; identical to SEQ ID NO: 7623
  oligonucleotide probe

SEQ ID NO: 31809 - DNA, 32 bp, Artificial; identical to SEQ ID NO: 7623
  oligonucleotide probe

SEQ ID NO: 31810 - DNA, 32 bp, Artificial; identical to SEQ ID NO: 7605
  oligonucleotide probe

SEQ ID NO: 31811 - DNA, 32 bp, Artificial; identical to SEQ ID NO: 7605
  oligonucleotide probe

SEQ ID NO: 31812 - DNA, 32 bp, Artificial; identical to SEQ ID NO: 8244
  oligonucleotide probe

SEQ ID NO: 31813 - DNA, 32 bp, Artificial; identical to SEQ ID NO: 8244
  oligonucleotide probe

SEQ ID NO: 31814 - DNA, 32 bp, Artificial; identical to SEQ ID NO: 5133
  oligonucleotide probe

SEQ ID NO: 31815 - DNA, 32 bp, Artificial; identical to SEQ ID NO: 5133
  oligonucleotide probe

SEQ ID NO: 31816 - DNA, 32 bp, Artificial; identical to SEQ ID NO: 5240
  oligonucleotide probe

SEQ ID NO: 31817 - DNA, 32 bp, Artificial; identical to SEQ ID NO: 5240
  oligonucleotide probe

SEQ ID NO: 31818 - DNA, 32 bp, Artificial; identical to SEQ ID NO: 7598
  oligonucleotide probe

SEQ ID NO: 31819 - DNA, 32 bp, Artificial; identical to SEQ ID NO: 7598
  oligonucleotide probe

SEQ ID NO: 31820 - DNA, 32 bp, Artificial; identical to SEQ ID NO: 7676
  oligonucleotide probe

SEQ ID NO: 31821 - DNA, 32 bp, Artificial; identical to SEQ ID NO: 7676
  oligonucleotide probe

SEQ ID NO: 31822 - DNA, 32 bp, Artificial; identical to SEQ ID NO: 5140
  oligonucleotide probe

SEQ ID NO: 31823 - DNA, 32 bp, Artificial; identical to SEQ ID NO: 5140
  oligonucleotide probe

SEQ ID NO: 31824 - DNA, 32 bp, Artificial; identical to SEQ ID NO: 8244
  oligonucleotide probe

SEQ ID NO: 31825 - DNA, 32 bp, Artificial; identical to SEQ ID NO: 8244
  oligonucleotide probe

SEQ ID NO: 31826 - DNA, 32 bp, Artificial; identical to SEQ ID NO: 5159
  oligonucleotide probe

SEQ ID NO: 31827 - DNA, 32 bp, Artificial; identical to SEQ ID NO: 5159
  oligonucleotide probe

SEQ ID NO: 31828 - DNA, 32 bp, Artificial; identical to SEQ ID NO: 7855
  oligonucleotide probe

SEQ ID NO: 31829 - DNA, 32 bp, Artificial; identical to SEQ ID NO: 7855
  oligonucleotide probe

SEQ ID NO: 31830 - DNA, 32 bp, Artificial; identical to SEQ ID NO: 7690
  oligonucleotide probe

SEQ ID NO: 31831 - DNA, 32 bp, Artificial; identical to SEQ ID NO: 7690
  oligonucleotide probe

SEQ ID NO: 31832 - DNA, 32 bp, Artificial; identical to SEQ ID NO: 5159
  oligonucleotide probe

SEQ ID NO: 31833 - DNA, 32 bp, Artificial; identical to SEQ ID NO: 5159
  oligonucleotide probe

SEQ ID NO: 31834 - DNA, 32 bp, Artificial; identical to SEQ ID NO: 5185
  oligonucleotide probe

SEQ ID NO: 31835 - DNA, 32 bp, Artificial; identical to SEQ ID NO: 5185
  oligonucleotide probe

SEQ ID NO: 31836 - DNA, 32 bp, Artificial; identical to SEQ ID NO: 7598
  oligonucleotide probe

SEQ ID NO: 31837 - DNA, 32 bp, Artificial; identical to SEQ ID NO: 7598
  oligonucleotide probe

SEQ ID NO: 31838 - DNA, 32 bp, Artificial; identical to SEQ ID NO: 7841
  oligonucleotide probe

SEQ ID NO: 31839 - DNA, 32 bp, Artificial; identical to SEQ ID NO: 7841
  oligonucleotide probe

SEQ ID NO: 31840 - DNA, 32 bp, Artificial; identical to SEQ ID NO: 7690
  oligonucleotide probe

SEQ ID NO: 31841 - DNA, 32 bp, Artificial; identical to SEQ ID NO: 7690
  oligonucleotide probe

SEQ ID NO: 31842 - DNA, 32 bp, Artificial; identical to SEQ ID NO: 5239
  oligonucleotide probe

SEQ ID NO: 31843 - DNA, 32 bp, Artificial; identical to SEQ ID NO: 5239
  oligonucleotide probe

SEQ ID NO: 31844 - DNA, 32 bp, Artificial; identical to SEQ ID NO: 7659
  oligonucleotide probe

SEQ ID NO: 31845 - DNA, 32 bp, Artificial; identical to SEQ ID NO: 7659
  oligonucleotide probe

SEQ ID NO: 31846 - DNA, 32 bp, Artificial; identical to SEQ ID NO: 7659
  oligonucleotide probe

SEQ ID NO: 31847 - DNA, 32 bp, Artificial; identical to SEQ ID NO: 7659
  oligonucleotide probe

SEQ ID NO: 31848 - DNA, 32 bp, Artificial; identical to SEQ ID NO: 7783
  oligonucleotide probe

SEQ ID NO: 31849 - DNA, 32 bp, Artificial; identical to SEQ ID NO: 7783
  oligonucleotide probe

SEQ ID NO: 31850 - DNA, 32 bp, Artificial; identical to SEQ ID NO: 7690
  oligonucleotide probe

SEQ ID NO: 31851 - DNA, 32 bp, Artificial; identical to SEQ ID NO: 7690
  oligonucleotide probe

SEQ ID NO: 31852 - DNA, 32 bp, Artificial; identical to SEQ ID NO: 7659
  oligonucleotide probe

SEQ ID NO: 31853 - DNA, 32 bp, Artificial; identical to SEQ ID NO: 7659
  oligonucleotide probe

SEQ ID NO: 31854 - DNA, 32 bp, Artificial; identical to SEQ ID NO: 7606
  oligonucleotide probe

SEQ ID NO: 31855 - DNA, 32 bp, Artificial; identical to SEQ ID NO: 7606
  oligonucleotide probe

SEQ ID NO: 31856 - DNA, 32 bp, Artificial; identical to SEQ ID NO: 7623
  oligonucleotide probe

SEQ ID NO: 31857 - DNA, 32 bp, Artificial; identical to SEQ ID NO: 7623
  oligonucleotide probe

SEQ ID NO: 31858 - DNA, 32 bp, Artificial; identical to SEQ ID NO: 7596
  oligonucleotide probe

SEQ ID NO: 31859 - DNA, 32 bp, Artificial; identical to SEQ ID NO: 7596
  oligonucleotide probe

SEQ ID NO: 31860 - DNA, 32 bp, Artificial; identical to SEQ ID NO: 7905
  oligonucleotide probe

SEQ ID NO: 31861 - DNA, 32 bp, Artificial; identical to SEQ ID NO: 7905
  oligonucleotide probe

SEQ ID NO: 31862 - DNA, 32 bp, Artificial; identical to SEQ ID NO: 7783
  oligonucleotide probe

SEQ ID NO: 31863 - DNA, 32 bp, Artificial; identical to SEQ ID NO: 7783
  oligonucleotide probe

SEQ ID NO: 31864 - DNA, 32 bp, Artificial; identical to SEQ ID NO: 7838
  oligonucleotide probe

SEQ ID NO: 31865 - DNA, 32 bp, Artificial; identical to SEQ ID NO: 7838
  oligonucleotide probe

SEQ ID NO: 31866 - DNA, 32 bp, Artificial; identical to SEQ ID NO: 7606
  oligonucleotide probe

SEQ ID NO: 31867 - DNA, 32 bp, Artificial; identical to SEQ ID NO: 7606
  oligonucleotide probe

SEQ ID NO: 31868 - DNA, 32 bp, Artificial; identical to SEQ ID NO: 7624
  oligonucleotide probe

SEQ ID NO: 31869 - DNA, 32 bp, Artificial; identical to SEQ ID NO: 7624
  oligonucleotide probe

SEQ ID NO: 31870 - DNA, 32 bp, Artificial; identical to SEQ ID NO: 5240
  oligonucleotide probe

SEQ ID NO: 31871 - DNA, 32 bp, Artificial; identical to SEQ ID NO: 5240
  oligonucleotide probe

SEQ ID NO: 31872 - DNA, 32 bp, Artificial; identical to SEQ ID NO: 7606
  oligonucleotide probe

SEQ ID NO: 31873 - DNA, 32 bp, Artificial; identical to SEQ ID NO: 7606
  oligonucleotide probe

SEQ ID NO: 31874 - DNA, 32 bp, Artificial; identical to SEQ ID NO: 5160
  oligonucleotide probe

SEQ ID NO: 31875 - DNA, 32 bp, Artificial; identical to SEQ ID NO: 5160
  oligonucleotide probe

SEQ ID NO: 31876 - DNA, 32 bp, Artificial; identical to SEQ ID NO: 7856
  oligonucleotide probe

SEQ ID NO: 31877 - DNA, 32 bp, Artificial; identical to SEQ ID NO: 7856
  oligonucleotide probe

SEQ ID NO: 31878 - DNA, 32 bp, Artificial; identical to SEQ ID NO: 7834
  oligonucleotide probe

SEQ ID NO: 31879 - DNA, 32 bp, Artificial; identical to SEQ ID NO: 7834
  oligonucleotide probe

SEQ ID NO: 31880 - DNA, 32 bp, Artificial; identical to SEQ ID NO: 5217
  oligonucleotide probe

SEQ ID NO: 31881 - DNA, 32 bp, Artificial; identical to SEQ ID NO: 5217
  oligonucleotide probe

SEQ ID NO: 31882 - DNA, 32 bp, Artificial; identical to SEQ ID NO: 5163
  oligonucleotide probe

SEQ ID NO: 31883 - DNA, 32 bp, Artificial; identical to SEQ ID NO: 5163
  oligonucleotide probe

SEQ ID NO: 31884 - DNA, 32 bp, Artificial; identical to SEQ ID NO: 5160
  oligonucleotide probe

SEQ ID NO: 31885 - DNA, 32 bp, Artificial; identical to SEQ ID NO: 5160
  oligonucleotide probe

SEQ ID NO: 31886 - DNA, 32 bp, Artificial; identical to SEQ ID NO: 7834
  oligonucleotide probe

SEQ ID NO: 31887 - DNA, 32 bp, Artificial; identical to SEQ ID NO: 7834
  oligonucleotide probe

SEQ ID NO: 31888 - DNA, 32 bp, Artificial; identical to SEQ ID NO: 5416
  oligonucleotide probe

SEQ ID NO: 31889 - DNA, 32 bp, Artificial; identical to SEQ ID NO: 5416
  oligonucleotide probe

SEQ ID NO: 31890 - DNA, 32 bp, Artificial; identical to SEQ ID NO: 7690
  oligonucleotide probe

SEQ ID NO: 31891 - DNA, 32 bp, Artificial; identical to SEQ ID NO: 7690
  oligonucleotide probe

SEQ ID NO: 31892 - DNA, 32 bp, Artificial; identical to SEQ ID NO: 7605
  oligonucleotide probe

SEQ ID NO: 31893 - DNA, 32 bp, Artificial; identical to SEQ ID NO: 7605
  oligonucleotide probe

SEQ ID NO: 31894 - DNA, 32 bp, Artificial; identical to SEQ ID NO: 5185
  oligonucleotide probe

SEQ ID NO: 31895 - DNA, 32 bp, Artificial; identical to SEQ ID NO: 5185
  oligonucleotide probe

SEQ ID NO: 31896 - DNA, 32 bp, Artificial; identical to SEQ ID NO: 5159
  oligonucleotide probe

SEQ ID NO: 31897 - DNA, 32 bp, Artificial; identical to SEQ ID NO: 5159
  oligonucleotide probe

SEQ ID NO: 31898 - DNA, 32 bp, Artificial; identical to SEQ ID NO: 5140
  oligonucleotide probe

SEQ ID NO: 31899 - DNA, 32 bp, Artificial; identical to SEQ ID NO: 5140
  oligonucleotide probe

SEQ ID NO: 31900 - DNA, 32 bp, Artificial; identical to SEQ ID NO: 7662
  oligonucleotide probe

SEQ ID NO: 31901 - DNA, 32 bp, Artificial; identical to SEQ ID NO: 7662
  oligonucleotide probe

SEQ ID NO: 31902 - DNA, 32 bp, Artificial; identical to SEQ ID NO: 5133
  oligonucleotide probe

SEQ ID NO: 31903 - DNA, 32 bp, Artificial; identical to SEQ ID NO: 5133
  oligonucleotide probe

SEQ ID NO: 31904 - DNA, 32 bp, Artificial; identical to SEQ ID NO: 7812
  oligonucleotide probe

SEQ ID NO: 31905 - DNA, 32 bp, Artificial; identical to SEQ ID NO: 7812
  oligonucleotide probe

SEQ ID NO: 31906 - DNA, 32 bp, Artificial; identical to SEQ ID NO: 5133
  oligonucleotide probe

SEQ ID NO: 31907 - DNA, 32 bp, Artificial; identical to SEQ ID NO: 5133
  oligonucleotide probe

SEQ ID NO: 31908 - DNA, 32 bp, Artificial; identical to SEQ ID NO: 5171
  oligonucleotide probe

SEQ ID NO: 31909 - DNA, 32 bp, Artificial; identical to SEQ ID NO: 5171
  oligonucleotide probe

SEQ ID NO: 31910 - DNA, 32 bp, Artificial; identical to SEQ ID NO: 7842
  oligonucleotide probe

SEQ ID NO: 31911 - DNA, 32 bp, Artificial; identical to SEQ ID NO: 7842
  oligonucleotide probe

SEQ ID NO: 31912 - DNA, 32 bp, Artificial; identical to SEQ ID NO: 7644
  oligonucleotide probe

SEQ ID NO: 31913 - DNA, 32 bp, Artificial; identical to SEQ ID NO: 7644
  oligonucleotide probe

SEQ ID NO: 31914 - DNA, 32 bp, Artificial; identical to SEQ ID NO: 7690
  oligonucleotide probe

SEQ ID NO: 31915 - DNA, 32 bp, Artificial; identical to SEQ ID NO: 7690
  oligonucleotide probe

SEQ ID NO: 31916 - DNA, 32 bp, Artificial; identical to SEQ ID NO: 7855
  oligonucleotide probe

SEQ ID NO: 31917 - DNA, 32 bp, Artificial; identical to SEQ ID NO: 7855
  oligonucleotide probe

SEQ ID NO: 31918 - DNA, 32 bp, Artificial; identical to SEQ ID NO: 5140
  oligonucleotide probe

SEQ ID NO: 31919 - DNA, 32 bp, Artificial; identical to SEQ ID NO: 5140
  oligonucleotide probe

SEQ ID NO: 31920 - DNA, 32 bp, Artificial; identical to SEQ ID NO: 7655
  oligonucleotide probe

SEQ ID NO: 31921 - DNA, 32 bp, Artificial; identical to SEQ ID NO: 7655
  oligonucleotide probe

SEQ ID NO: 31922 - DNA, 32 bp, Artificial; identical to SEQ ID NO: 10064
  oligonucleotide probe

SEQ ID NO: 31923 - DNA, 32 bp, Artificial; identical to SEQ ID NO: 10064
  oligonucleotide probe

SEQ ID NO: 31924 - DNA, 32 bp, Artificial; identical to SEQ ID NO: 7606
  oligonucleotide probe

SEQ ID NO: 31925 - DNA, 32 bp, Artificial; identical to SEQ ID NO: 7606
  oligonucleotide probe

SEQ ID NO: 31926 - DNA, 32 bp, Artificial; identical to SEQ ID NO: 7835
  oligonucleotide probe

SEQ ID NO: 31927 - DNA, 32 bp, Artificial; identical to SEQ ID NO: 7835
  oligonucleotide probe

SEQ ID NO: 31928 - DNA, 32 bp, Artificial; identical to SEQ ID NO: 7834
  oligonucleotide probe

SEQ ID NO: 31929 - DNA, 32 bp, Artificial; identical to SEQ ID NO: 7834
  oligonucleotide probe

SEQ ID NO: 31930 - DNA, 32 bp, Artificial; identical to SEQ ID NO: 7659
  oligonucleotide probe

SEQ ID NO: 31931 - DNA, 32 bp, Artificial; identical to SEQ ID NO: 7659
  oligonucleotide probe

SEQ ID NO: 31932 - DNA, 32 bp, Artificial; identical to SEQ ID NO: 8778
  oligonucleotide probe

SEQ ID NO: 31933 - DNA, 32 bp, Artificial; identical to SEQ ID NO: 8778
  oligonucleotide probe

SEQ ID NO: 31934 - DNA, 32 bp, Artificial; identical to SEQ ID NO: 7597
  oligonucleotide probe

SEQ ID NO: 31935 - DNA, 32 bp, Artificial; identical to SEQ ID NO: 7597
  oligonucleotide probe

SEQ ID NO: 31936 - DNA, 32 bp, Artificial; identical to SEQ ID NO: 7947
  oligonucleotide probe

SEQ ID NO: 31937 - DNA, 32 bp, Artificial; identical to SEQ ID NO: 7947
  oligonucleotide probe

SEQ ID NO: 31938 - DNA, 32 bp, Artificial; identical to SEQ ID NO: 5163
  oligonucleotide probe

SEQ ID NO: 31939 - DNA, 32 bp, Artificial; identical to SEQ ID NO: 5163
  oligonucleotide probe

SEQ ID NO: 31940 - DNA, 32 bp, Artificial; identical to SEQ ID NO: 7655
  oligonucleotide probe

SEQ ID NO: 31941 - DNA, 32 bp, Artificial; identical to SEQ ID NO: 7655
  oligonucleotide probe

SEQ ID NO: 31942 - DNA, 32 bp, Artificial; identical to SEQ ID NO: 5133
  oligonucleotide probe

SEQ ID NO: 31943 - DNA, 32 bp, Artificial; identical to SEQ ID NO: 5133
  oligonucleotide probe

SEQ ID NO: 31944 - DNA, 32 bp, Artificial; identical to SEQ ID NO: 7655
  oligonucleotide probe

SEQ ID NO: 31945 - DNA, 32 bp, Artificial; identical to SEQ ID NO: 7655
  oligonucleotide probe

SEQ ID NO: 31946 - DNA, 32 bp, Artificial; identical to SEQ ID NO: 7597
  oligonucleotide probe

SEQ ID NO: 31947 - DNA, 32 bp, Artificial; identical to SEQ ID NO: 7597
  oligonucleotide probe

SEQ ID NO: 31948 - DNA, 32 bp, Artificial; identical to SEQ ID NO: 5220
  oligonucleotide probe

SEQ ID NO: 31949 - DNA, 32 bp, Artificial; identical to SEQ ID NO: 5220
  oligonucleotide probe

SEQ ID NO: 31950 - DNA, 32 bp, Artificial; identical to SEQ ID NO: 7783
  oligonucleotide probe

SEQ ID NO: 31951 - DNA, 32 bp, Artificial; identical to SEQ ID NO: 7783
  oligonucleotide probe

SEQ ID NO: 31952 - DNA, 32 bp, Artificial; identical to SEQ ID NO: 5171
  oligonucleotide probe

SEQ ID NO: 31953 - DNA, 32 bp, Artificial; identical to SEQ ID NO: 5171
  oligonucleotide probe

SEQ ID NO: 31954 - DNA, 32 bp, Artificial; identical to SEQ ID NO: 7594
  oligonucleotide probe

SEQ ID NO: 31955 - DNA, 32 bp, Artificial; identical to SEQ ID NO: 7594
  oligonucleotide probe

SEQ ID NO: 31956 - DNA, 32 bp, Artificial; identical to SEQ ID NO: 7676
  oligonucleotide probe

SEQ ID NO: 31957 - DNA, 32 bp, Artificial; identical to SEQ ID NO: 7676
  oligonucleotide probe

SEQ ID NO: 31958 - DNA, 32 bp, Artificial; identical to SEQ ID NO: 7865
  oligonucleotide probe

SEQ ID NO: 31959 - DNA, 32 bp, Artificial; identical to SEQ ID NO: 7865
  oligonucleotide probe

SEQ ID NO: 31960 - DNA, 32 bp, Artificial; identical to SEQ ID NO: 5136
  oligonucleotide probe

SEQ ID NO: 31961 - DNA, 32 bp, Artificial; identical to SEQ ID NO: 5136
  oligonucleotide probe

SEQ ID NO: 31962 - DNA, 32 bp, Artificial; identical to SEQ ID NO: 5220
  oligonucleotide probe

SEQ ID NO: 31963 - DNA, 32 bp, Artificial; identical to SEQ ID NO: 5220
  oligonucleotide probe

SEQ ID NO: 31964 - DNA, 32 bp, Artificial; identical to SEQ ID NO: 5231
  oligonucleotide probe

SEQ ID NO: 31965 - DNA, 32 bp, Artificial; identical to SEQ ID NO: 5231
  oligonucleotide probe

SEQ ID NO: 31966 - DNA, 32 bp, Artificial; identical to SEQ ID NO: 7597
  oligonucleotide probe

SEQ ID NO: 31967 - DNA, 32 bp, Artificial; identical to SEQ ID NO: 7597
  oligonucleotide probe

SEQ ID NO: 31968 - DNA, 32 bp, Artificial; identical to SEQ ID NO: 7624
  oligonucleotide probe

SEQ ID NO: 31969 - DNA, 32 bp, Artificial; identical to SEQ ID NO: 7624
  oligonucleotide probe

SEQ ID NO: 31970 - DNA, 32 bp, Artificial; identical to SEQ ID NO: 5223
  oligonucleotide probe

SEQ ID NO: 31971 - DNA, 32 bp, Artificial; identical to SEQ ID NO: 5223
  oligonucleotide probe

SEQ ID NO: 31972 - DNA, 32 bp, Artificial; identical to SEQ ID NO: 7783
  oligonucleotide probe

SEQ ID NO: 31973 - DNA, 32 bp, Artificial; identical to SEQ ID NO: 7783
  oligonucleotide probe

SEQ ID NO: 31974 - DNA, 32 bp, Artificial; identical to SEQ ID NO: 5171
  oligonucleotide probe

SEQ ID NO: 31975 - DNA, 32 bp, Artificial; identical to SEQ ID NO: 5171
  oligonucleotide probe

SEQ ID NO: 31976 - DNA, 32 bp, Artificial; identical to SEQ ID NO: 7676
  oligonucleotide probe

SEQ ID NO: 31977 - DNA, 32 bp, Artificial; identical to SEQ ID NO: 7676
  oligonucleotide probe

SEQ ID NO: 31978 - DNA, 32 bp, Artificial; identical to SEQ ID NO: 7690
  oligonucleotide probe

SEQ ID NO: 31979 - DNA, 32 bp, Artificial; identical to SEQ ID NO: 7690
  oligonucleotide probe

SEQ ID NO: 31980 - DNA, 32 bp, Artificial; identical to SEQ ID NO: 5163
  oligonucleotide probe

SEQ ID NO: 31981 - DNA, 32 bp, Artificial; identical to SEQ ID NO: 5163
  oligonucleotide probe

SEQ ID NO: 31982 - DNA, 32 bp, Artificial; identical to SEQ ID NO: 5133
  oligonucleotide probe

SEQ ID NO: 31983 - DNA, 32 bp, Artificial; identical to SEQ ID NO: 5133
  oligonucleotide probe

SEQ ID NO: 31984 - DNA, 32 bp, Artificial; identical to SEQ ID NO: 7832
  oligonucleotide probe

SEQ ID NO: 31985 - DNA, 32 bp, Artificial; identical to SEQ ID NO: 7832
  oligonucleotide probe

SEQ ID NO: 31986 - DNA, 32 bp, Artificial; identical to SEQ ID NO: 5140
  oligonucleotide probe

SEQ ID NO: 31987 - DNA, 32 bp, Artificial; identical to SEQ ID NO: 5140
  oligonucleotide probe

SEQ ID NO: 31988 - DNA, 32 bp, Artificial; identical to SEQ ID NO: 5141
  oligonucleotide probe

SEQ ID NO: 31989 - DNA, 32 bp, Artificial; identical to SEQ ID NO: 5141
  oligonucleotide probe

SEQ ID NO: 31990 - DNA, 32 bp, Artificial; identical to SEQ ID NO: 7835
  oligonucleotide probe

SEQ ID NO: 31991 - DNA, 32 bp, Artificial; identical to SEQ ID NO: 7835
  oligonucleotide probe

SEQ ID NO: 31992 - DNA, 32 bp, Artificial; identical to SEQ ID NO: 8776
  oligonucleotide probe

SEQ ID NO: 31993 - DNA, 32 bp, Artificial; identical to SEQ ID NO: 8776
  oligonucleotide probe

SEQ ID NO: 31994 - DNA, 32 bp, Artificial; identical to SEQ ID NO: 7605
  oligonucleotide probe

SEQ ID NO: 31995 - DNA, 32 bp, Artificial; identical to SEQ ID NO: 7605
  oligonucleotide probe

SEQ ID NO: 31996 - DNA, 32 bp, Artificial; identical to SEQ ID NO: 7605
  oligonucleotide probe

SEQ ID NO: 31997 - DNA, 32 bp, Artificial; identical to SEQ ID NO: 7605
  oligonucleotide probe

SEQ ID NO: 31998 - DNA, 32 bp, Artificial; identical to SEQ ID NO: 7905
  oligonucleotide probe

SEQ ID NO: 31999 - DNA, 32 bp, Artificial; identical to SEQ ID NO: 7905
  oligonucleotide probe

SEQ ID NO: 32000 - DNA, 32 bp, Artificial; identical to SEQ ID NO: 7623
  oligonucleotide probe

SEQ ID NO: 32001 - DNA, 32 bp, Artificial; identical to SEQ ID NO: 7623
  oligonucleotide probe

SEQ ID NO: 32002 - DNA, 32 bp, Artificial; identical to SEQ ID NO: 5134
  oligonucleotide probe

SEQ ID NO: 32003 - DNA, 32 bp, Artificial; identical to SEQ ID NO: 5134
  oligonucleotide probe

SEQ ID NO: 32004 - DNA, 32 bp, Artificial; identical to SEQ ID NO: 7841
  oligonucleotide probe

SEQ ID NO: 32005 - DNA, 32 bp, Artificial; identical to SEQ ID NO: 7841
  oligonucleotide probe

SEQ ID NO: 32006 - DNA, 32 bp, Artificial; identical to SEQ ID NO: 5185
  oligonucleotide probe

SEQ ID NO: 32007 - DNA, 32 bp, Artificial; identical to SEQ ID NO: 5185
  oligonucleotide probe

SEQ ID NO: 32008 - DNA, 32 bp, Artificial; identical to SEQ ID NO: 5141
  oligonucleotide probe

SEQ ID NO: 32009 - DNA, 32 bp, Artificial; identical to SEQ ID NO: 5141
  oligonucleotide probe

SEQ ID NO: 32010 - DNA, 32 bp, Artificial; identical to SEQ ID NO: 5223
  oligonucleotide probe

SEQ ID NO: 32011 - DNA, 32 bp, Artificial; identical to SEQ ID NO: 5223
  oligonucleotide probe

SEQ ID NO: 32012 - DNA, 32 bp, Artificial; identical to SEQ ID NO: 7838
  oligonucleotide probe

SEQ ID NO: 32013 - DNA, 32 bp, Artificial; identical to SEQ ID NO: 7838
  oligonucleotide probe

SEQ ID NO: 32014 - DNA, 32 bp, Artificial; identical to SEQ ID NO: 7676
  oligonucleotide probe

SEQ ID NO: 32015 - DNA, 32 bp, Artificial; identical to SEQ ID NO: 7676
  oligonucleotide probe

SEQ ID NO: 32016 - DNA, 32 bp, Artificial; identical to SEQ ID NO: 7596
  oligonucleotide probe

SEQ ID NO: 32017 - DNA, 32 bp, Artificial; identical to SEQ ID NO: 7596
  oligonucleotide probe

SEQ ID NO: 32018 - DNA, 32 bp, Artificial; identical to SEQ ID NO: 5134
  oligonucleotide probe

SEQ ID NO: 32019 - DNA, 32 bp, Artificial; identical to SEQ ID NO: 5134
  oligonucleotide probe

SEQ ID NO: 32020 - DNA, 32 bp, Artificial; identical to SEQ ID NO: 7855
  oligonucleotide probe

SEQ ID NO: 32021 - DNA, 32 bp, Artificial; identical to SEQ ID NO: 7855
  oligonucleotide probe

SEQ ID NO: 32022 - DNA, 32 bp, Artificial; identical to SEQ ID NO: 7606
  oligonucleotide probe

SEQ ID NO: 32023 - DNA, 32 bp, Artificial; identical to SEQ ID NO: 7606
  oligonucleotide probe

SEQ ID NO: 32024 - DNA, 32 bp, Artificial; identical to SEQ ID NO: 5224
  oligonucleotide probe

SEQ ID NO: 32025 - DNA, 32 bp, Artificial; identical to SEQ ID NO: 5224
  oligonucleotide probe

SEQ ID NO: 32026 - DNA, 32 bp, Artificial; identical to SEQ ID NO: 7606
  oligonucleotide probe

SEQ ID NO: 32027 - DNA, 32 bp, Artificial; identical to SEQ ID NO: 7606
  oligonucleotide probe

SEQ ID NO: 32028 - DNA, 32 bp, Artificial; identical to SEQ ID NO: 9038
  oligonucleotide probe

SEQ ID NO: 32029 - DNA, 32 bp, Artificial; identical to SEQ ID NO: 9038
  oligonucleotide probe

SEQ ID NO: 32030 - DNA, 32 bp, Artificial; identical to SEQ ID NO: 5171
  oligonucleotide probe

SEQ ID NO: 32031 - DNA, 32 bp, Artificial; identical to SEQ ID NO: 5171
  oligonucleotide probe

SEQ ID NO: 32032 - DNA, 32 bp, Artificial; identical to SEQ ID NO: 7863
  oligonucleotide probe

SEQ ID NO: 32033 - DNA, 32 bp, Artificial; identical to SEQ ID NO: 7863
  oligonucleotide probe

SEQ ID NO: 32034 - DNA, 32 bp, Artificial; identical to SEQ ID NO: 5159
  oligonucleotide probe

SEQ ID NO: 32035 - DNA, 32 bp, Artificial; identical to SEQ ID NO: 5159
  oligonucleotide probe

SEQ ID NO: 32036 - DNA, 32 bp, Artificial; identical to SEQ ID NO: 7832
  oligonucleotide probe

SEQ ID NO: 32037 - DNA, 32 bp, Artificial; identical to SEQ ID NO: 7832
  oligonucleotide probe

SEQ ID NO: 32038 - DNA, 32 bp, Artificial; identical to SEQ ID NO: 5185
  oligonucleotide probe

SEQ ID NO: 32039 - DNA, 32 bp, Artificial; identical to SEQ ID NO: 5185
  oligonucleotide probe

SEQ ID NO: 32040 - DNA, 32 bp, Artificial; identical to SEQ ID NO: 7673
  oligonucleotide probe

SEQ ID NO: 32041 - DNA, 32 bp, Artificial; identical to SEQ ID NO: 7673
  oligonucleotide probe

SEQ ID NO: 32042 - DNA, 32 bp, Artificial; identical to SEQ ID NO: 5133
  oligonucleotide probe

SEQ ID NO: 32043 - DNA, 32 bp, Artificial; identical to SEQ ID NO: 5133
  oligonucleotide probe

SEQ ID NO: 32044 - DNA, 32 bp, Artificial; identical to SEQ ID NO: 7866
  oligonucleotide probe

SEQ ID NO: 32045 - DNA, 32 bp, Artificial; identical to SEQ ID NO: 7866
  oligonucleotide probe

SEQ ID NO: 32046 - DNA, 32 bp, Artificial; identical to SEQ ID NO: 5171
  oligonucleotide probe

SEQ ID NO: 32047 - DNA, 32 bp, Artificial; identical to SEQ ID NO: 5171
  oligonucleotide probe

SEQ ID NO: 32048 - DNA, 32 bp, Artificial; identical to SEQ ID NO: 7948
  oligonucleotide probe

SEQ ID NO: 32049 - DNA, 32 bp, Artificial; identical to SEQ ID NO: 7948
  oligonucleotide probe

SEQ ID NO: 32050 - DNA, 32 bp, Artificial; identical to SEQ ID NO: 5185
  oligonucleotide probe

SEQ ID NO: 32051 - DNA, 32 bp, Artificial; identical to SEQ ID NO: 5185
  oligonucleotide probe

SEQ ID NO: 32052 - DNA, 32 bp, Artificial; identical to SEQ ID NO: 7673
  oligonucleotide probe

SEQ ID NO: 32053 - DNA, 32 bp, Artificial; identical to SEQ ID NO: 7673
  oligonucleotide probe

SEQ ID NO: 32054 - DNA, 32 bp, Artificial; identical to SEQ ID NO: 7863
  oligonucleotide probe

SEQ ID NO: 32055 - DNA, 32 bp, Artificial; identical to SEQ ID NO: 7863
  oligonucleotide probe

SEQ ID NO: 32056 - DNA, 32 bp, Artificial; identical to SEQ ID NO: 7662
  oligonucleotide probe

SEQ ID NO: 32057 - DNA, 32 bp, Artificial; identical to SEQ ID NO: 7662
  oligonucleotide probe

SEQ ID NO: 32058 - DNA, 32 bp, Artificial; identical to SEQ ID NO: 7833
  oligonucleotide probe

SEQ ID NO: 32059 - DNA, 32 bp, Artificial; identical to SEQ ID NO: 7833
  oligonucleotide probe

SEQ ID NO: 32060 - DNA, 32 bp, Artificial; identical to SEQ ID NO: 7594
  oligonucleotide probe

SEQ ID NO: 32061 - DNA, 32 bp, Artificial; identical to SEQ ID NO: 7594
  oligonucleotide probe

SEQ ID NO: 32062 - DNA, 32 bp, Artificial; identical to SEQ ID NO: 7676
  oligonucleotide probe

SEQ ID NO: 32063 - DNA, 32 bp, Artificial; identical to SEQ ID NO: 7676
  oligonucleotide probe

SEQ ID NO: 32064 - DNA, 32 bp, Artificial; identical to SEQ ID NO: 7623
  oligonucleotide probe

SEQ ID NO: 32065 - DNA, 32 bp, Artificial; identical to SEQ ID NO: 7623
  oligonucleotide probe

SEQ ID NO: 32066 - DNA, 32 bp, Artificial; identical to SEQ ID NO: 5171
  oligonucleotide probe

SEQ ID NO: 32067 - DNA, 32 bp, Artificial; identical to SEQ ID NO: 5171
  oligonucleotide probe

SEQ ID NO: 32068 - DNA, 32 bp, Artificial; identical to SEQ ID NO: 5136
  oligonucleotide probe

SEQ ID NO: 32069 - DNA, 32 bp, Artificial; identical to SEQ ID NO: 5136
  oligonucleotide probe

SEQ ID NO: 32070 - DNA, 32 bp, Artificial; identical to SEQ ID NO: 8247
  oligonucleotide probe

SEQ ID NO: 32071 - DNA, 32 bp, Artificial; identical to SEQ ID NO: 8247
  oligonucleotide probe

SEQ ID NO: 32072 - DNA, 32 bp, Artificial; identical to SEQ ID NO: 7833
  oligonucleotide probe

SEQ ID NO: 32073 - DNA, 32 bp, Artificial; identical to SEQ ID NO: 7833
  oligonucleotide probe

SEQ ID NO: 32074 - DNA, 32 bp, Artificial; identical to SEQ ID NO: 5159
  oligonucleotide probe

SEQ ID NO: 32075 - DNA, 32 bp, Artificial; identical to SEQ ID NO: 5159
  oligonucleotide probe

SEQ ID NO: 32076 - DNA, 32 bp, Artificial; identical to SEQ ID NO: 7596
  oligonucleotide probe

SEQ ID NO: 32077 - DNA, 32 bp, Artificial; identical to SEQ ID NO: 7596
  oligonucleotide probe

SEQ ID NO: 32078 - DNA, 32 bp, Artificial; identical to SEQ ID NO: 7623
  oligonucleotide probe

SEQ ID NO: 32079 - DNA, 32 bp, Artificial; identical to SEQ ID NO: 7623
  oligonucleotide probe

SEQ ID NO: 32080 - DNA, 32 bp, Artificial; identical to SEQ ID NO: 7655
  oligonucleotide probe

SEQ ID NO: 32081 - DNA, 32 bp, Artificial; identical to SEQ ID NO: 7655
  oligonucleotide probe

SEQ ID NO: 32082 - DNA, 32 bp, Artificial; identical to SEQ ID NO: 7838
  oligonucleotide probe

SEQ ID NO: 32083 - DNA, 32 bp, Artificial; identical to SEQ ID NO: 7838
  oligonucleotide probe

SEQ ID NO: 32084 - DNA, 32 bp, Artificial; identical to SEQ ID NO: 5159
  oligonucleotide probe

SEQ ID NO: 32085 - DNA, 32 bp, Artificial; identical to SEQ ID NO: 5159
  oligonucleotide probe

SEQ ID NO: 32086 - DNA, 32 bp, Artificial; identical to SEQ ID NO: 7891
  oligonucleotide probe

SEQ ID NO: 32087 - DNA, 32 bp, Artificial; identical to SEQ ID NO: 7891
  oligonucleotide probe

SEQ ID NO: 32088 - DNA, 32 bp, Artificial; identical to SEQ ID NO: 7948
  oligonucleotide probe

SEQ ID NO: 32089 - DNA, 32 bp, Artificial; identical to SEQ ID NO: 7948
  oligonucleotide probe

SEQ ID NO: 32090 - DNA, 32 bp, Artificial; identical to SEQ ID NO: 7655
  oligonucleotide probe

SEQ ID NO: 32091 - DNA, 32 bp, Artificial; identical to SEQ ID NO: 7655
  oligonucleotide probe

SEQ ID NO: 32092 - DNA, 32 bp, Artificial; identical to SEQ ID NO: 7676
  oligonucleotide probe

SEQ ID NO: 32093 - DNA, 32 bp, Artificial; identical to SEQ ID NO: 7676
  oligonucleotide probe

SEQ ID NO: 32094 - DNA, 32 bp, Artificial; identical to SEQ ID NO: 5136
  oligonucleotide probe

SEQ ID NO: 32095 - DNA, 32 bp, Artificial; identical to SEQ ID NO: 5136
  oligonucleotide probe

SEQ ID NO: 32096 - DNA, 32 bp, Artificial; identical to SEQ ID NO: 7662
  oligonucleotide probe

SEQ ID NO: 32097 - DNA, 32 bp, Artificial; identical to SEQ ID NO: 7662
  oligonucleotide probe

SEQ ID NO: 32098 - DNA, 32 bp, Artificial; identical to SEQ ID NO: 7596
  oligonucleotide probe

SEQ ID NO: 32099 - DNA, 32 bp, Artificial; identical to SEQ ID NO: 7596
  oligonucleotide probe

SEQ ID NO: 32100 - DNA, 32 bp, Artificial; identical to SEQ ID NO: 7606
  oligonucleotide probe

SEQ ID NO: 32101 - DNA, 32 bp, Artificial; identical to SEQ ID NO: 7606
  oligonucleotide probe

SEQ ID NO: 32102 - DNA, 32 bp, Artificial; identical to SEQ ID NO: 7655
  oligonucleotide probe

SEQ ID NO: 32103 - DNA, 32 bp, Artificial; identical to SEQ ID NO: 7655
  oligonucleotide probe

SEQ ID NO: 32104 - DNA, 32 bp, Artificial; identical to SEQ ID NO: 7606
  oligonucleotide probe

SEQ ID NO: 32105 - DNA, 32 bp, Artificial; identical to SEQ ID NO: 7606
  oligonucleotide probe

SEQ ID NO: 32106 - DNA, 32 bp, Artificial; identical to SEQ ID NO: 7948
  oligonucleotide probe

SEQ ID NO: 32107 - DNA, 32 bp, Artificial; identical to SEQ ID NO: 7948
  oligonucleotide probe

SEQ ID NO: 32108 - DNA, 32 bp, Artificial; identical to SEQ ID NO: 5136
  oligonucleotide probe

SEQ ID NO: 32109 - DNA, 32 bp, Artificial; identical to SEQ ID NO: 5136
  oligonucleotide probe

SEQ ID NO: 32110 - DNA, 32 bp, Artificial; identical to SEQ ID NO: 5399
  oligonucleotide probe

SEQ ID NO: 32111 - DNA, 32 bp, Artificial; identical to SEQ ID NO: 5399
  oligonucleotide probe

SEQ ID NO: 32112 - DNA, 32 bp, Artificial; identical to SEQ ID NO: 7624
  oligonucleotide probe

SEQ ID NO: 32113 - DNA, 32 bp, Artificial; identical to SEQ ID NO: 7624
  oligonucleotide probe

SEQ ID NO: 32114 - DNA, 32 bp, Artificial; identical to SEQ ID NO: 10053
  oligonucleotide probe

SEQ ID NO: 32115 - DNA, 32 bp, Artificial; identical to SEQ ID NO: 10053
  oligonucleotide probe

SEQ ID NO: 32116 - DNA, 32 bp, Artificial; identical to SEQ ID NO: 7676
  oligonucleotide probe

SEQ ID NO: 32117 - DNA, 32 bp, Artificial; identical to SEQ ID NO: 7676
  oligonucleotide probe

SEQ ID NO: 32118 - DNA, 32 bp, Artificial; identical to SEQ ID NO: 7694
  oligonucleotide probe

SEQ ID NO: 32119 - DNA, 32 bp, Artificial; identical to SEQ ID NO: 7694
  oligonucleotide probe

SEQ ID NO: 32120 - DNA, 32 bp, Artificial; identical to SEQ ID NO: 8240
  oligonucleotide probe

SEQ ID NO: 32121 - DNA, 32 bp, Artificial; identical to SEQ ID NO: 8240
  oligonucleotide probe

SEQ ID NO: 32122 - DNA, 32 bp, Artificial; identical to SEQ ID NO: 5171
  oligonucleotide probe

SEQ ID NO: 32123 - DNA, 32 bp, Artificial; identical to SEQ ID NO: 5171
  oligonucleotide probe

SEQ ID NO: 32124 - DNA, 32 bp, Artificial; identical to SEQ ID NO: 7644
  oligonucleotide probe

SEQ ID NO: 32125 - DNA, 32 bp, Artificial; identical to SEQ ID NO: 7644
  oligonucleotide probe

SEQ ID NO: 32126 - DNA, 32 bp, Artificial; identical to SEQ ID NO: 8001
  oligonucleotide probe

SEQ ID NO: 32127 - DNA, 32 bp, Artificial; identical to SEQ ID NO: 8001
  oligonucleotide probe

SEQ ID NO: 32128 - DNA, 32 bp, Artificial; identical to SEQ ID NO: 7676
  oligonucleotide probe

SEQ ID NO: 32129 - DNA, 32 bp, Artificial; identical to SEQ ID NO: 7676
  oligonucleotide probe

SEQ ID NO: 32130 - DNA, 32 bp, Artificial; identical to SEQ ID NO: 7673
  oligonucleotide probe

SEQ ID NO: 32131 - DNA, 32 bp, Artificial; identical to SEQ ID NO: 7673
  oligonucleotide probe

SEQ ID NO: 32132 - DNA, 32 bp, Artificial; identical to SEQ ID NO: 5134
  oligonucleotide probe

SEQ ID NO: 32133 - DNA, 32 bp, Artificial; identical to SEQ ID NO: 5134
  oligonucleotide probe

SEQ ID NO: 32134 - DNA, 32 bp, Artificial; identical to SEQ ID NO: 7856
  oligonucleotide probe

SEQ ID NO: 32135 - DNA, 32 bp, Artificial; identical to SEQ ID NO: 7856
  oligonucleotide probe

SEQ ID NO: 32136 - DNA, 32 bp, Artificial; identical to SEQ ID NO: 9826
  oligonucleotide probe

SEQ ID NO: 32137 - DNA, 32 bp, Artificial; identical to SEQ ID NO: 9826
  oligonucleotide probe

SEQ ID NO: 32138 - DNA, 32 bp, Artificial; identical to SEQ ID NO: 5133
  oligonucleotide probe

SEQ ID NO: 32139 - DNA, 32 bp, Artificial; identical to SEQ ID NO: 5133
  oligonucleotide probe

SEQ ID NO: 32140 - DNA, 32 bp, Artificial; identical to SEQ ID NO: 5159
  oligonucleotide probe

SEQ ID NO: 32141 - DNA, 32 bp, Artificial; identical to SEQ ID NO: 5159
  oligonucleotide probe

SEQ ID NO: 32142 - DNA, 32 bp, Artificial; identical to SEQ ID NO: 7673
  oligonucleotide probe

SEQ ID NO: 32143 - DNA, 32 bp, Artificial; identical to SEQ ID NO: 7673
  oligonucleotide probe

SEQ ID NO: 32144 - DNA, 32 bp, Artificial; identical to SEQ ID NO: 5134
  oligonucleotide probe

SEQ ID NO: 32145 - DNA, 32 bp, Artificial; identical to SEQ ID NO: 5134
  oligonucleotide probe

SEQ ID NO: 32146 - DNA, 32 bp, Artificial; identical to SEQ ID NO: 8240
  oligonucleotide probe

SEQ ID NO: 32147 - DNA, 32 bp, Artificial; identical to SEQ ID NO: 8240
  oligonucleotide probe

SEQ ID NO: 32148 - DNA, 32 bp, Artificial; identical to SEQ ID NO: 7597
  oligonucleotide probe

SEQ ID NO: 32149 - DNA, 32 bp, Artificial; identical to SEQ ID NO: 7597
  oligonucleotide probe

SEQ ID NO: 32150 - DNA, 32 bp, Artificial; identical to SEQ ID NO: 7598
  oligonucleotide probe

SEQ ID NO: 32151 - DNA, 32 bp, Artificial; identical to SEQ ID NO: 7598
  oligonucleotide probe

SEQ ID NO: 32152 - DNA, 32 bp, Artificial; identical to SEQ ID NO: 7673
  oligonucleotide probe

SEQ ID NO: 32153 - DNA, 32 bp, Artificial; identical to SEQ ID NO: 7673
  oligonucleotide probe

SEQ ID NO: 32154 - DNA, 32 bp, Artificial; identical to SEQ ID NO: 5133
  oligonucleotide probe

SEQ ID NO: 32155 - DNA, 32 bp, Artificial; identical to SEQ ID NO: 5133
  oligonucleotide probe

SEQ ID NO: 32156 - DNA, 32 bp, Artificial; identical to SEQ ID NO: 8244
  oligonucleotide probe

SEQ ID NO: 32157 - DNA, 32 bp, Artificial; identical to SEQ ID NO: 8244
  oligonucleotide probe

SEQ ID NO: 32158 - DNA, 32 bp, Artificial; identical to SEQ ID NO: 7594
  oligonucleotide probe

SEQ ID NO: 32159 - DNA, 32 bp, Artificial; identical to SEQ ID NO: 7594
  oligonucleotide probe

SEQ ID NO: 32160 - DNA, 32 bp, Artificial; identical to SEQ ID NO: 7834
  oligonucleotide probe

SEQ ID NO: 32161 - DNA, 32 bp, Artificial; identical to SEQ ID NO: 7834
  oligonucleotide probe

SEQ ID NO: 32162 - DNA, 32 bp, Artificial; identical to SEQ ID NO: 5133
  oligonucleotide probe

SEQ ID NO: 32163 - DNA, 32 bp, Artificial; identical to SEQ ID NO: 5133
  oligonucleotide probe

SEQ ID NO: 32164 - DNA, 32 bp, Artificial; identical to SEQ ID NO: 7856
  oligonucleotide probe

SEQ ID NO: 32165 - DNA, 32 bp, Artificial; identical to SEQ ID NO: 7856
  oligonucleotide probe

SEQ ID NO: 32166 - DNA, 32 bp, Artificial; identical to SEQ ID NO: 8780
  oligonucleotide probe

SEQ ID NO: 32167 - DNA, 32 bp, Artificial; identical to SEQ ID NO: 8780
  oligonucleotide probe

SEQ ID NO: 32168 - DNA, 32 bp, Artificial; identical to SEQ ID NO: 7624
  oligonucleotide probe

SEQ ID NO: 32169 - DNA, 32 bp, Artificial; identical to SEQ ID NO: 7624
  oligonucleotide probe

SEQ ID NO: 32170 - DNA, 32 bp, Artificial; identical to SEQ ID NO: 5140
  oligonucleotide probe

SEQ ID NO: 32171 - DNA, 32 bp, Artificial; identical to SEQ ID NO: 5140
  oligonucleotide probe

SEQ ID NO: 32172 - DNA, 32 bp, Artificial; identical to SEQ ID NO: 5185
  oligonucleotide probe

SEQ ID NO: 32173 - DNA, 32 bp, Artificial; identical to SEQ ID NO: 5185
  oligonucleotide probe

SEQ ID NO: 32174 - DNA, 32 bp, Artificial; identical to SEQ ID NO: 7891
  oligonucleotide probe

SEQ ID NO: 32175 - DNA, 32 bp, Artificial; identical to SEQ ID NO: 7891
  oligonucleotide probe

SEQ ID NO: 32176 - DNA, 32 bp, Artificial; identical to SEQ ID NO: 7598
  oligonucleotide probe

SEQ ID NO: 32177 - DNA, 32 bp, Artificial; identical to SEQ ID NO: 7598
  oligonucleotide probe

SEQ ID NO: 32178 - DNA, 32 bp, Artificial; identical to SEQ ID NO: 9020
  oligonucleotide probe

SEQ ID NO: 32179 - DNA, 32 bp, Artificial; identical to SEQ ID NO: 9020
  oligonucleotide probe

SEQ ID NO: 32180 - DNA, 32 bp, Artificial; identical to SEQ ID NO: 7676
  oligonucleotide probe

SEQ ID NO: 32181 - DNA, 32 bp, Artificial; identical to SEQ ID NO: 7676
  oligonucleotide probe

SEQ ID NO: 32182 - DNA, 32 bp, Artificial; identical to SEQ ID NO: 5416
  oligonucleotide probe

SEQ ID NO: 32183 - DNA, 32 bp, Artificial; identical to SEQ ID NO: 5416
  oligonucleotide probe

SEQ ID NO: 32184 - DNA, 32 bp, Artificial; identical to SEQ ID NO: 7676
  oligonucleotide probe

SEQ ID NO: 32185 - DNA, 32 bp, Artificial; identical to SEQ ID NO: 7676
  oligonucleotide probe

SEQ ID NO: 32186 - DNA, 32 bp, Artificial; identical to SEQ ID NO: 7834
  oligonucleotide probe

SEQ ID NO: 32187 - DNA, 32 bp, Artificial; identical to SEQ ID NO: 7834
  oligonucleotide probe

SEQ ID NO: 32188 - DNA, 32 bp, Artificial; identical to SEQ ID NO: 7905
  oligonucleotide probe

SEQ ID NO: 32189 - DNA, 32 bp, Artificial; identical to SEQ ID NO: 7905
  oligonucleotide probe

SEQ ID NO: 32190 - DNA, 32 bp, Artificial; identical to SEQ ID NO: 7833
  oligonucleotide probe

SEQ ID NO: 32191 - DNA, 32 bp, Artificial; identical to SEQ ID NO: 7833
  oligonucleotide probe

SEQ ID NO: 32192 - DNA, 32 bp, Artificial; identical to SEQ ID NO: 7865
  oligonucleotide probe

SEQ ID NO: 32193 - DNA, 32 bp, Artificial; identical to SEQ ID NO: 7865
  oligonucleotide probe

SEQ ID NO: 32194 - DNA, 32 bp, Artificial; identical to SEQ ID NO: 7947
  oligonucleotide probe

SEQ ID NO: 32195 - DNA, 32 bp, Artificial; identical to SEQ ID NO: 7947
  oligonucleotide probe

SEQ ID NO: 32196 - DNA, 32 bp, Artificial; identical to SEQ ID NO: 7624
  oligonucleotide probe

SEQ ID NO: 32197 - DNA, 32 bp, Artificial; identical to SEQ ID NO: 7624
  oligonucleotide probe

SEQ ID NO: 32198 - DNA, 32 bp, Artificial; identical to SEQ ID NO: 5160
  oligonucleotide probe

SEQ ID NO: 32199 - DNA, 32 bp, Artificial; identical to SEQ ID NO: 5160
  oligonucleotide probe

SEQ ID NO: 32200 - DNA, 32 bp, Artificial; identical to SEQ ID NO: 5141
  oligonucleotide probe

SEQ ID NO: 32201 - DNA, 32 bp, Artificial; identical to SEQ ID NO: 5141
  oligonucleotide probe

SEQ ID NO: 32202 - DNA, 32 bp, Artificial; identical to SEQ ID NO: 5232
  oligonucleotide probe

SEQ ID NO: 32203 - DNA, 32 bp, Artificial; identical to SEQ ID NO: 5232
  oligonucleotide probe

SEQ ID NO: 32204 - DNA, 32 bp, Artificial; identical to SEQ ID NO: 5136
  oligonucleotide probe

SEQ ID NO: 32205 - DNA, 32 bp, Artificial; identical to SEQ ID NO: 5136
  oligonucleotide probe

SEQ ID NO: 32206 - DNA, 32 bp, Artificial; identical to SEQ ID NO: 7597
  oligonucleotide probe

SEQ ID NO: 32207 - DNA, 32 bp, Artificial; identical to SEQ ID NO: 7597
  oligonucleotide probe

SEQ ID NO: 32208 - DNA, 32 bp, Artificial; identical to SEQ ID NO: 8047
  oligonucleotide probe

SEQ ID NO: 32209 - DNA, 32 bp, Artificial; identical to SEQ ID NO: 8047
  oligonucleotide probe

SEQ ID NO: 32210 - DNA, 32 bp, Artificial; identical to SEQ ID NO: 8047
  oligonucleotide probe

SEQ ID NO: 32211 - DNA, 32 bp, Artificial; identical to SEQ ID NO: 8047
  oligonucleotide probe

SEQ ID NO: 32212 - DNA, 32 bp, Artificial; identical to SEQ ID NO: 5160
  oligonucleotide probe

SEQ ID NO: 32213 - DNA, 32 bp, Artificial; identical to SEQ ID NO: 5160
  oligonucleotide probe

SEQ ID NO: 32214 - DNA, 32 bp, Artificial; identical to SEQ ID NO: 5140
  oligonucleotide probe

SEQ ID NO: 32215 - DNA, 32 bp, Artificial; identical to SEQ ID NO: 5140
  oligonucleotide probe

SEQ ID NO: 32216 - DNA, 32 bp, Artificial; identical to SEQ ID NO: 7690
  oligonucleotide probe

SEQ ID NO: 32217 - DNA, 32 bp, Artificial; identical to SEQ ID NO: 7690
  oligonucleotide probe

SEQ ID NO: 32218 - DNA, 32 bp, Artificial; identical to SEQ ID NO: 7655
  oligonucleotide probe

SEQ ID NO: 32219 - DNA, 32 bp, Artificial; identical to SEQ ID NO: 7655
  oligonucleotide probe

SEQ ID NO: 32220 - DNA, 32 bp, Artificial; identical to SEQ ID NO: 5232
  oligonucleotide probe

SEQ ID NO: 32221 - DNA, 32 bp, Artificial; identical to SEQ ID NO: 5232
  oligonucleotide probe

SEQ ID NO: 32222 - DNA, 32 bp, Artificial; identical to SEQ ID NO: 7855
  oligonucleotide probe

SEQ ID NO: 32223 - DNA, 32 bp, Artificial; identical to SEQ ID NO: 7855
  oligonucleotide probe

SEQ ID NO: 32224 - DNA, 32 bp, Artificial; identical to SEQ ID NO: 7865
  oligonucleotide probe

SEQ ID NO: 32225 - DNA, 32 bp, Artificial; identical to SEQ ID NO: 7865
  oligonucleotide probe

SEQ ID NO: 32226 - DNA, 32 bp, Artificial; identical to SEQ ID NO: 7905
  oligonucleotide probe

SEQ ID NO: 32227 - DNA, 32 bp, Artificial; identical to SEQ ID NO: 7905
  oligonucleotide probe

SEQ ID NO: 32228 - DNA, 32 bp, Artificial; identical to SEQ ID NO: 7812
  oligonucleotide probe

SEQ ID NO: 32229 - DNA, 32 bp, Artificial; identical to SEQ ID NO: 7812
  oligonucleotide probe

SEQ ID NO: 32230 - DNA, 32 bp, Artificial; identical to SEQ ID NO: 7594
  oligonucleotide probe

SEQ ID NO: 32231 - DNA, 32 bp, Artificial; identical to SEQ ID NO: 7594
  oligonucleotide probe

SEQ ID NO: 32232 - DNA, 32 bp, Artificial; identical to SEQ ID NO: 7865
  oligonucleotide probe

SEQ ID NO: 32233 - DNA, 32 bp, Artificial; identical to SEQ ID NO: 7865
  oligonucleotide probe

SEQ ID NO: 32234 - DNA, 32 bp, Artificial; identical to SEQ ID NO: 7783
  oligonucleotide probe

SEQ ID NO: 32235 - DNA, 32 bp, Artificial; identical to SEQ ID NO: 7783
  oligonucleotide probe

SEQ ID NO: 32236 - DNA, 32 bp, Artificial; identical to SEQ ID NO: 5141
  oligonucleotide probe

SEQ ID NO: 32237 - DNA, 32 bp, Artificial; identical to SEQ ID NO: 5141
  oligonucleotide probe

SEQ ID NO: 32238 - DNA, 32 bp, Artificial; identical to SEQ ID NO: 7644
  oligonucleotide probe

SEQ ID NO: 32239 - DNA, 32 bp, Artificial; identical to SEQ ID NO: 7644
  oligonucleotide probe

SEQ ID NO: 32240 - DNA, 32 bp, Artificial; identical to SEQ ID NO: 7840
  oligonucleotide probe

SEQ ID NO: 32241 - DNA, 32 bp, Artificial; identical to SEQ ID NO: 7840
  oligonucleotide probe

SEQ ID NO: 32242 - DNA, 32 bp, Artificial; identical to SEQ ID NO: 5223
  oligonucleotide probe

SEQ ID NO: 32243 - DNA, 32 bp, Artificial; identical to SEQ ID NO: 5223
  oligonucleotide probe

SEQ ID NO: 32244 - DNA, 32 bp, Artificial; identical to SEQ ID NO: 8247
  oligonucleotide probe

SEQ ID NO: 32245 - DNA, 32 bp, Artificial; identical to SEQ ID NO: 8247
  oligonucleotide probe

SEQ ID NO: 32246 - DNA, 32 bp, Artificial; identical to SEQ ID NO: 5218
  oligonucleotide probe

SEQ ID NO: 32247 - DNA, 32 bp, Artificial; identical to SEQ ID NO: 5218
  oligonucleotide probe

SEQ ID NO: 32248 - DNA, 32 bp, Artificial; identical to SEQ ID NO: 5416
  oligonucleotide probe

SEQ ID NO: 32249 - DNA, 32 bp, Artificial; identical to SEQ ID NO: 5416
  oligonucleotide probe

SEQ ID NO: 32250 - DNA, 32 bp, Artificial; identical to SEQ ID NO: 7624
  oligonucleotide probe

SEQ ID NO: 32251 - DNA, 32 bp, Artificial; identical to SEQ ID NO: 7624
  oligonucleotide probe

SEQ ID NO: 32252 - DNA, 32 bp, Artificial; identical to SEQ ID NO: 8001
  oligonucleotide probe

SEQ ID NO: 32253 - DNA, 32 bp, Artificial; identical to SEQ ID NO: 8001
  oligonucleotide probe

SEQ ID NO: 32254 - DNA, 32 bp, Artificial; identical to SEQ ID NO: 7856
  oligonucleotide probe

SEQ ID NO: 32255 - DNA, 32 bp, Artificial; identical to SEQ ID NO: 7856
  oligonucleotide probe

SEQ ID NO: 32256 - DNA, 32 bp, Artificial; identical to SEQ ID NO: 7891
  oligonucleotide probe

SEQ ID NO: 32257 - DNA, 32 bp, Artificial; identical to SEQ ID NO: 7891
  oligonucleotide probe

SEQ ID NO: 32258 - DNA, 32 bp, Artificial; identical to SEQ ID NO: 7623
  oligonucleotide probe

SEQ ID NO: 32259 - DNA, 32 bp, Artificial; identical to SEQ ID NO: 7623
  oligonucleotide probe

SEQ ID NO: 32260 - DNA, 32 bp, Artificial; identical to SEQ ID NO: 7662
  oligonucleotide probe

SEQ ID NO: 32261 - DNA, 32 bp, Artificial; identical to SEQ ID NO: 7662
  oligonucleotide probe

SEQ ID NO: 32262 - DNA, 32 bp, Artificial; identical to SEQ ID NO: 8571
  oligonucleotide probe

SEQ ID NO: 32263 - DNA, 32 bp, Artificial; identical to SEQ ID NO: 8571
  oligonucleotide probe

SEQ ID NO: 32264 - DNA, 32 bp, Artificial; identical to SEQ ID NO: 7694
  oligonucleotide probe

SEQ ID NO: 32265 - DNA, 32 bp, Artificial; identical to SEQ ID NO: 7694
  oligonucleotide probe

SEQ ID NO: 32266 - DNA, 32 bp, Artificial; identical to SEQ ID NO: 7853
  oligonucleotide probe

SEQ ID NO: 32267 - DNA, 32 bp, Artificial; identical to SEQ ID NO: 7853
  oligonucleotide probe

SEQ ID NO: 32268 - DNA, 32 bp, Artificial; identical to SEQ ID NO: 5159
  oligonucleotide probe

SEQ ID NO: 32269 - DNA, 32 bp, Artificial; identical to SEQ ID NO: 5159
  oligonucleotide probe

SEQ ID NO: 32270 - DNA, 32 bp, Artificial; identical to SEQ ID NO: 8240
  oligonucleotide probe

SEQ ID NO: 32271 - DNA, 32 bp, Artificial; identical to SEQ ID NO: 8240
  oligonucleotide probe

SEQ ID NO: 32272 - DNA, 32 bp, Artificial; identical to SEQ ID NO: 7624
  oligonucleotide probe

SEQ ID NO: 32273 - DNA, 32 bp, Artificial; identical to SEQ ID NO: 7624
  oligonucleotide probe

SEQ ID NO: 32274 - DNA, 32 bp, Artificial; identical to SEQ ID NO: 5185
  oligonucleotide probe

SEQ ID NO: 32275 - DNA, 32 bp, Artificial; identical to SEQ ID NO: 5185
  oligonucleotide probe

SEQ ID NO: 32276 - DNA, 32 bp, Artificial; identical to SEQ ID NO: 7644
  oligonucleotide probe

SEQ ID NO: 32277 - DNA, 32 bp, Artificial; identical to SEQ ID NO: 7644
  oligonucleotide probe

SEQ ID NO: 32278 - DNA, 32 bp, Artificial; identical to SEQ ID NO: 8001
  oligonucleotide probe

SEQ ID NO: 32279 - DNA, 32 bp, Artificial; identical to SEQ ID NO: 8001
  oligonucleotide probe

SEQ ID NO: 32280 - DNA, 32 bp, Artificial; identical to SEQ ID NO: 7655
  oligonucleotide probe

SEQ ID NO: 32281 - DNA, 32 bp, Artificial; identical to SEQ ID NO: 7655
  oligonucleotide probe

SEQ ID NO: 32282 - DNA, 32 bp, Artificial; identical to SEQ ID NO: 7694
  oligonucleotide probe

SEQ ID NO: 32283 - DNA, 32 bp, Artificial; identical to SEQ ID NO: 7694
  oligonucleotide probe

SEQ ID NO: 32284 - DNA, 32 bp, Artificial; identical to SEQ ID NO: 5239
  oligonucleotide probe

SEQ ID NO: 32285 - DNA, 32 bp, Artificial; identical to SEQ ID NO: 5239
  oligonucleotide probe

SEQ ID NO: 32286 - DNA, 32 bp, Artificial; identical to SEQ ID NO: 7676
  oligonucleotide probe

SEQ ID NO: 32287 - DNA, 32 bp, Artificial; identical to SEQ ID NO: 7676
  oligonucleotide probe

SEQ ID NO: 32288 - DNA, 32 bp, Artificial; identical to SEQ ID NO: 7833
  oligonucleotide probe

SEQ ID NO: 32289 - DNA, 32 bp, Artificial; identical to SEQ ID NO: 7833
  oligonucleotide probe

SEQ ID NO: 32290 - DNA, 32 bp, Artificial; identical to SEQ ID NO: 7597
  oligonucleotide probe

SEQ ID NO: 32291 - DNA, 32 bp, Artificial; identical to SEQ ID NO: 7597
  oligonucleotide probe

SEQ ID NO: 32292 - DNA, 32 bp, Artificial; identical to SEQ ID NO: 7655
  oligonucleotide probe

SEQ ID NO: 32293 - DNA, 32 bp, Artificial; identical to SEQ ID NO: 7655
  oligonucleotide probe

SEQ ID NO: 32294 - DNA, 32 bp, Artificial; identical to SEQ ID NO: 7832
  oligonucleotide probe

SEQ ID NO: 32295 - DNA, 32 bp, Artificial; identical to SEQ ID NO: 7832
  oligonucleotide probe

SEQ ID NO: 32296 - DNA, 32 bp, Artificial; identical to SEQ ID NO: 5140
  oligonucleotide probe

SEQ ID NO: 32297 - DNA, 32 bp, Artificial; identical to SEQ ID NO: 5140
  oligonucleotide probe

SEQ ID NO: 32298 - DNA, 32 bp, Artificial; identical to SEQ ID NO: 7812
  oligonucleotide probe

SEQ ID NO: 32299 - DNA, 32 bp, Artificial; identical to SEQ ID NO: 7812
  oligonucleotide probe

SEQ ID NO: 32300 - DNA, 32 bp, Artificial; identical to SEQ ID NO: 7644
  oligonucleotide probe

SEQ ID NO: 32301 - DNA, 32 bp, Artificial; identical to SEQ ID NO: 7644
  oligonucleotide probe

SEQ ID NO: 32302 - DNA, 32 bp, Artificial; identical to SEQ ID NO: 7662
  oligonucleotide probe

SEQ ID NO: 32303 - DNA, 32 bp, Artificial; identical to SEQ ID NO: 7662
  oligonucleotide probe

SEQ ID NO: 32304 - DNA, 32 bp, Artificial; identical to SEQ ID NO: 8047
  oligonucleotide probe

SEQ ID NO: 32305 - DNA, 32 bp, Artificial; identical to SEQ ID NO: 8047
  oligonucleotide probe

SEQ ID NO: 32306 - DNA, 32 bp, Artificial; identical to SEQ ID NO: 7623
  oligonucleotide probe

SEQ ID NO: 32307 - DNA, 32 bp, Artificial; identical to SEQ ID NO: 7623
  oligonucleotide probe

SEQ ID NO: 32308 - DNA, 32 bp, Artificial; identical to SEQ ID NO: 7676
  oligonucleotide probe

SEQ ID NO: 32309 - DNA, 32 bp, Artificial; identical to SEQ ID NO: 7676
  oligonucleotide probe

SEQ ID NO: 32310 - DNA, 32 bp, Artificial; identical to SEQ ID NO: 7623
  oligonucleotide probe

SEQ ID NO: 32311 - DNA, 32 bp, Artificial; identical to SEQ ID NO: 7623
  oligonucleotide probe

SEQ ID NO: 32312 - DNA, 32 bp, Artificial; identical to SEQ ID NO: 7659
  oligonucleotide probe

SEQ ID NO: 32313 - DNA, 32 bp, Artificial; identical to SEQ ID NO: 7659
  oligonucleotide probe

SEQ ID NO: 32314 - DNA, 32 bp, Artificial; identical to SEQ ID NO: 7662
  oligonucleotide probe

SEQ ID NO: 32315 - DNA, 32 bp, Artificial; identical to SEQ ID NO: 7662
  oligonucleotide probe

SEQ ID NO: 32316 - DNA, 32 bp, Artificial; identical to SEQ ID NO: 7623
  oligonucleotide probe

SEQ ID NO: 32317 - DNA, 32 bp, Artificial; identical to SEQ ID NO: 7623
  oligonucleotide probe

SEQ ID NO: 32318 - DNA, 32 bp, Artificial; identical to SEQ ID NO: 7644
  oligonucleotide probe

SEQ ID NO: 32319 - DNA, 32 bp, Artificial; identical to SEQ ID NO: 7644
  oligonucleotide probe

SEQ ID NO: 32320 - DNA, 32 bp, Artificial; identical to SEQ ID NO: 8244
  oligonucleotide probe

SEQ ID NO: 32321 - DNA, 32 bp, Artificial; identical to SEQ ID NO: 8244
  oligonucleotide probe

SEQ ID NO: 32322 - DNA, 32 bp, Artificial; identical to SEQ ID NO: 7662
  oligonucleotide probe

SEQ ID NO: 32323 - DNA, 32 bp, Artificial; identical to SEQ ID NO: 7662
  oligonucleotide probe

SEQ ID NO: 32324 - DNA, 32 bp, Artificial; identical to SEQ ID NO: 5399
  oligonucleotide probe

SEQ ID NO: 32325 - DNA, 32 bp, Artificial; identical to SEQ ID NO: 5399
  oligonucleotide probe

SEQ ID NO: 32326 - DNA, 32 bp, Artificial; identical to SEQ ID NO: 8001
  oligonucleotide probe

SEQ ID NO: 32327 - DNA, 32 bp, Artificial; identical to SEQ ID NO: 8001
  oligonucleotide probe

SEQ ID NO: 32328 - DNA, 32 bp, Artificial; identical to SEQ ID NO: 5416
  oligonucleotide probe

SEQ ID NO: 32329 - DNA, 32 bp, Artificial; identical to SEQ ID NO: 5416
  oligonucleotide probe

SEQ ID NO: 32330 - DNA, 32 bp, Artificial; identical to SEQ ID NO: 7853
  oligonucleotide probe

SEQ ID NO: 32331 - DNA, 32 bp, Artificial; identical to SEQ ID NO: 7853
  oligonucleotide probe

SEQ ID NO: 32332 - DNA, 32 bp, Artificial; identical to SEQ ID NO: 7644
  oligonucleotide probe

SEQ ID NO: 32333 - DNA, 32 bp, Artificial; identical to SEQ ID NO: 7644
  oligonucleotide probe

SEQ ID NO: 32334 - DNA, 32 bp, Artificial; identical to SEQ ID NO: 7947
  oligonucleotide probe

SEQ ID NO: 32335 - DNA, 32 bp, Artificial; identical to SEQ ID NO: 7947
  oligonucleotide probe

SEQ ID NO: 32336 - DNA, 32 bp, Artificial; identical to SEQ ID NO: 5185
  oligonucleotide probe

SEQ ID NO: 32337 - DNA, 32 bp, Artificial; identical to SEQ ID NO: 5185
  oligonucleotide probe

SEQ ID NO: 32338 - DNA, 32 bp, Artificial; identical to SEQ ID NO: 7662
  oligonucleotide probe

SEQ ID NO: 32339 - DNA, 32 bp, Artificial; identical to SEQ ID NO: 7662
  oligonucleotide probe

SEQ ID NO: 32340 - DNA, 32 bp, Artificial; identical to SEQ ID NO: 5160
  oligonucleotide probe

SEQ ID NO: 32341 - DNA, 32 bp, Artificial; identical to SEQ ID NO: 5160
  oligonucleotide probe

SEQ ID NO: 32342 - DNA, 32 bp, Artificial; identical to SEQ ID NO: 5231
  oligonucleotide probe

SEQ ID NO: 32343 - DNA, 32 bp, Artificial; identical to SEQ ID NO: 5231
  oligonucleotide probe

SEQ ID NO: 32344 - DNA, 32 bp, Artificial; identical to SEQ ID NO: 7659
  oligonucleotide probe

SEQ ID NO: 32345 - DNA, 32 bp, Artificial; identical to SEQ ID NO: 7659
  oligonucleotide probe

SEQ ID NO: 32346 - DNA, 32 bp, Artificial; identical to SEQ ID NO: 5217
  oligonucleotide probe

SEQ ID NO: 32347 - DNA, 32 bp, Artificial; identical to SEQ ID NO: 5217
  oligonucleotide probe

SEQ ID NO: 32348 - DNA, 32 bp, Artificial; identical to SEQ ID NO: 7597
  oligonucleotide probe

SEQ ID NO: 32349 - DNA, 32 bp, Artificial; identical to SEQ ID NO: 7597
  oligonucleotide probe

SEQ ID NO: 32350 - DNA, 32 bp, Artificial; identical to SEQ ID NO: 5185
  oligonucleotide probe

SEQ ID NO: 32351 - DNA, 32 bp, Artificial; identical to SEQ ID NO: 5185
  oligonucleotide probe

SEQ ID NO: 32352 - DNA, 32 bp, Artificial; identical to SEQ ID NO: 5416
  oligonucleotide probe

SEQ ID NO: 32353 - DNA, 32 bp, Artificial; identical to SEQ ID NO: 5416
  oligonucleotide probe

SEQ ID NO: 32354 - DNA, 32 bp, Artificial; identical to SEQ ID NO: 7947
  oligonucleotide probe

SEQ ID NO: 32355 - DNA, 32 bp, Artificial; identical to SEQ ID NO: 7947
  oligonucleotide probe

SEQ ID NO: 32356 - DNA, 32 bp, Artificial; identical to SEQ ID NO: 5171
  oligonucleotide probe

SEQ ID NO: 32357 - DNA, 32 bp, Artificial; identical to SEQ ID NO: 5171
  oligonucleotide probe

SEQ ID NO: 32358 - DNA, 32 bp, Artificial; identical to SEQ ID NO: 7833
  oligonucleotide probe

SEQ ID NO: 32359 - DNA, 32 bp, Artificial; identical to SEQ ID NO: 7833
  oligonucleotide probe

SEQ ID NO: 32360 - DNA, 32 bp, Artificial; identical to SEQ ID NO: 5133
  oligonucleotide probe

SEQ ID NO: 32361 - DNA, 32 bp, Artificial; identical to SEQ ID NO: 5133
  oligonucleotide probe

SEQ ID NO: 32362 - DNA, 32 bp, Artificial; identical to SEQ ID NO: 7623
  oligonucleotide probe

SEQ ID NO: 32363 - DNA, 32 bp, Artificial; identical to SEQ ID NO: 7623
  oligonucleotide probe

SEQ ID NO: 32364 - DNA, 32 bp, Artificial; identical to SEQ ID NO: 5134
  oligonucleotide probe

SEQ ID NO: 32365 - DNA, 32 bp, Artificial; identical to SEQ ID NO: 5134
  oligonucleotide probe

SEQ ID NO: 32366 - DNA, 32 bp, Artificial; identical to SEQ ID NO: 8571
  oligonucleotide probe

SEQ ID NO: 32367 - DNA, 32 bp, Artificial; identical to SEQ ID NO: 8571
  oligonucleotide probe

SEQ ID NO: 32368 - DNA, 32 bp, Artificial; identical to SEQ ID NO: 7623
  oligonucleotide probe

SEQ ID NO: 32369 - DNA, 32 bp, Artificial; identical to SEQ ID NO: 7623
  oligonucleotide probe

SEQ ID NO: 32370 - DNA, 32 bp, Artificial; identical to SEQ ID NO: 7833
  oligonucleotide probe

SEQ ID NO: 32371 - DNA, 32 bp, Artificial; identical to SEQ ID NO: 7833
  oligonucleotide probe

SEQ ID NO: 32372 - DNA, 32 bp, Artificial; identical to SEQ ID NO: 8001
  oligonucleotide probe

SEQ ID NO: 32373 - DNA, 32 bp, Artificial; identical to SEQ ID NO: 8001
  oligonucleotide probe

SEQ ID NO: 32374 - DNA, 32 bp, Artificial; identical to SEQ ID NO: 5218
  oligonucleotide probe

SEQ ID NO: 32375 - DNA, 32 bp, Artificial; identical to SEQ ID NO: 5218
  oligonucleotide probe

SEQ ID NO: 32376 - DNA, 32 bp, Artificial; identical to SEQ ID NO: 5136
  oligonucleotide probe

SEQ ID NO: 32377 - DNA, 32 bp, Artificial; identical to SEQ ID NO: 5136
  oligonucleotide probe

SEQ ID NO: 32378 - DNA, 32 bp, Artificial; identical to SEQ ID NO: 7596
  oligonucleotide probe

SEQ ID NO: 32379 - DNA, 32 bp, Artificial; identical to SEQ ID NO: 7596
  oligonucleotide probe

SEQ ID NO: 32380 - DNA, 32 bp, Artificial; identical to SEQ ID NO: 7597
  oligonucleotide probe

SEQ ID NO: 32381 - DNA, 32 bp, Artificial; identical to SEQ ID NO: 7597
  oligonucleotide probe

SEQ ID NO: 32382 - DNA, 32 bp, Artificial; identical to SEQ ID NO: 7598
  oligonucleotide probe

SEQ ID NO: 32383 - DNA, 32 bp, Artificial; identical to SEQ ID NO: 7598
  oligonucleotide probe

SEQ ID NO: 32384 - DNA, 32 bp, Artificial; identical to SEQ ID NO: 5171
  oligonucleotide probe

SEQ ID NO: 32385 - DNA, 32 bp, Artificial; identical to SEQ ID NO: 5171
  oligonucleotide probe

SEQ ID NO: 32386 - DNA, 32 bp, Artificial; identical to SEQ ID NO: 7598
  oligonucleotide probe

SEQ ID NO: 32387 - DNA, 32 bp, Artificial; identical to SEQ ID NO: 7598
  oligonucleotide probe

SEQ ID NO: 32388 - DNA, 32 bp, Artificial; identical to SEQ ID NO: 7840
  oligonucleotide probe

SEQ ID NO: 32389 - DNA, 32 bp, Artificial; identical to SEQ ID NO: 7840
  oligonucleotide probe

SEQ ID NO: 32390 - DNA, 32 bp, Artificial; identical to SEQ ID NO: 7676
  oligonucleotide probe

SEQ ID NO: 32391 - DNA, 32 bp, Artificial; identical to SEQ ID NO: 7676
  oligonucleotide probe

SEQ ID NO: 32392 - DNA, 32 bp, Artificial; identical to SEQ ID NO: 5140
  oligonucleotide probe

SEQ ID NO: 32393 - DNA, 32 bp, Artificial; identical to SEQ ID NO: 5140
  oligonucleotide probe

SEQ ID NO: 32394 - DNA, 32 bp, Artificial; identical to SEQ ID NO: 7676
  oligonucleotide probe

SEQ ID NO: 32395 - DNA, 32 bp, Artificial; identical to SEQ ID NO: 7676
  oligonucleotide probe

SEQ ID NO: 32396 - DNA, 32 bp, Artificial; identical to SEQ ID NO: 8244
  oligonucleotide probe

SEQ ID NO: 32397 - DNA, 32 bp, Artificial; identical to SEQ ID NO: 8244
  oligonucleotide probe

SEQ ID NO: 32398 - DNA, 32 bp, Artificial; identical to SEQ ID NO: 5218
  oligonucleotide probe

SEQ ID NO: 32399 - DNA, 32 bp, Artificial; identical to SEQ ID NO: 5218
  oligonucleotide probe

SEQ ID NO: 32400 - DNA, 32 bp, Artificial; identical to SEQ ID NO: 7947
  oligonucleotide probe

SEQ ID NO: 32401 - DNA, 32 bp, Artificial; identical to SEQ ID NO: 7947
  oligonucleotide probe

SEQ ID NO: 32402 - DNA, 32 bp, Artificial; identical to SEQ ID NO: 5136
  oligonucleotide probe

SEQ ID NO: 32403 - DNA, 32 bp, Artificial; identical to SEQ ID NO: 5136
  oligonucleotide probe

SEQ ID NO: 32404 - DNA, 32 bp, Artificial; identical to SEQ ID NO: 5171
  oligonucleotide probe

SEQ ID NO: 32405 - DNA, 32 bp, Artificial; identical to SEQ ID NO: 5171
  oligonucleotide probe

SEQ ID NO: 32406 - DNA, 32 bp, Artificial; identical to SEQ ID NO: 7597
  oligonucleotide probe

SEQ ID NO: 32407 - DNA, 32 bp, Artificial; identical to SEQ ID NO: 7597
  oligonucleotide probe

SEQ ID NO: 32408 - DNA, 32 bp, Artificial; identical to SEQ ID NO: 7905
  oligonucleotide probe

SEQ ID NO: 32409 - DNA, 32 bp, Artificial; identical to SEQ ID NO: 7905
  oligonucleotide probe

SEQ ID NO: 32410 - DNA, 32 bp, Artificial; identical to SEQ ID NO: 5239
  oligonucleotide probe

SEQ ID NO: 32411 - DNA, 32 bp, Artificial; identical to SEQ ID NO: 5239
  oligonucleotide probe

SEQ ID NO: 32412 - DNA, 32 bp, Artificial; identical to SEQ ID NO: 5231
  oligonucleotide probe

SEQ ID NO: 32413 - DNA, 32 bp, Artificial; identical to SEQ ID NO: 5231
  oligonucleotide probe

SEQ ID NO: 32414 - DNA, 32 bp, Artificial; identical to SEQ ID NO: 8244
  oligonucleotide probe

SEQ ID NO: 32415 - DNA, 32 bp, Artificial; identical to SEQ ID NO: 8244
  oligonucleotide probe

SEQ ID NO: 32416 - DNA, 32 bp, Artificial; identical to SEQ ID NO: 7594
  oligonucleotide probe

SEQ ID NO: 32417 - DNA, 32 bp, Artificial; identical to SEQ ID NO: 7594
  oligonucleotide probe

SEQ ID NO: 32418 - DNA, 32 bp, Artificial; identical to SEQ ID NO: 7783
  oligonucleotide probe

SEQ ID NO: 32419 - DNA, 32 bp, Artificial; identical to SEQ ID NO: 7783
  oligonucleotide probe

SEQ ID NO: 32420 - DNA, 32 bp, Artificial; identical to SEQ ID NO: 8467
  oligonucleotide probe

SEQ ID NO: 32421 - DNA, 32 bp, Artificial; identical to SEQ ID NO: 8467
  oligonucleotide probe

SEQ ID NO: 32422 - DNA, 32 bp, Artificial; identical to SEQ ID NO: 7659
  oligonucleotide probe

SEQ ID NO: 32423 - DNA, 32 bp, Artificial; identical to SEQ ID NO: 7659
  oligonucleotide probe

SEQ ID NO: 32424 - DNA, 32 bp, Artificial; identical to SEQ ID NO: 7605
  oligonucleotide probe

SEQ ID NO: 32425 - DNA, 32 bp, Artificial; identical to SEQ ID NO: 7605
  oligonucleotide probe

SEQ ID NO: 32426 - DNA, 32 bp, Artificial; identical to SEQ ID NO: 7644
  oligonucleotide probe

SEQ ID NO: 32427 - DNA, 32 bp, Artificial; identical to SEQ ID NO: 7644
  oligonucleotide probe

SEQ ID NO: 32428 - DNA, 32 bp, Artificial; identical to SEQ ID NO: 5141
  oligonucleotide probe

SEQ ID NO: 32429 - DNA, 32 bp, Artificial; identical to SEQ ID NO: 5141
  oligonucleotide probe

SEQ ID NO: 32430 - DNA, 32 bp, Artificial; identical to SEQ ID NO: 7690
  oligonucleotide probe

SEQ ID NO: 32431 - DNA, 32 bp, Artificial; identical to SEQ ID NO: 7690
  oligonucleotide probe

SEQ ID NO: 32432 - DNA, 32 bp, Artificial; identical to SEQ ID NO: 7694
  oligonucleotide probe

SEQ ID NO: 32433 - DNA, 32 bp, Artificial; identical to SEQ ID NO: 7694
  oligonucleotide probe

SEQ ID NO: 32434 - DNA, 32 bp, Artificial; identical to SEQ ID NO: 5134
  oligonucleotide probe

SEQ ID NO: 32435 - DNA, 32 bp, Artificial; identical to SEQ ID NO: 5134
  oligonucleotide probe

SEQ ID NO: 32436 - DNA, 32 bp, Artificial; identical to SEQ ID NO: 5163
  oligonucleotide probe

SEQ ID NO: 32437 - DNA, 32 bp, Artificial; identical to SEQ ID NO: 5163
  oligonucleotide probe

SEQ ID NO: 32438 - DNA, 32 bp, Artificial; identical to SEQ ID NO: 7655
  oligonucleotide probe

SEQ ID NO: 32439 - DNA, 32 bp, Artificial; identical to SEQ ID NO: 7655
  oligonucleotide probe

SEQ ID NO: 32440 - DNA, 32 bp, Artificial; identical to SEQ ID NO: 5231
  oligonucleotide probe

SEQ ID NO: 32441 - DNA, 32 bp, Artificial; identical to SEQ ID NO: 5231
  oligonucleotide probe

SEQ ID NO: 32442 - DNA, 32 bp, Artificial; identical to SEQ ID NO: 5416
  oligonucleotide probe

SEQ ID NO: 32443 - DNA, 32 bp, Artificial; identical to SEQ ID NO: 5416
  oligonucleotide probe

SEQ ID NO: 32444 - DNA, 32 bp, Artificial; identical to SEQ ID NO: 7644
  oligonucleotide probe

SEQ ID NO: 32445 - DNA, 32 bp, Artificial; identical to SEQ ID NO: 7644
  oligonucleotide probe

SEQ ID NO: 32446 - DNA, 32 bp, Artificial; identical to SEQ ID NO: 7863
  oligonucleotide probe

SEQ ID NO: 32447 - DNA, 32 bp, Artificial; identical to SEQ ID NO: 7863
  oligonucleotide probe

SEQ ID NO: 32448 - DNA, 32 bp, Artificial; identical to SEQ ID NO: 7834
  oligonucleotide probe

SEQ ID NO: 32449 - DNA, 32 bp, Artificial; identical to SEQ ID NO: 7834
  oligonucleotide probe

SEQ ID NO: 32450 - DNA, 32 bp, Artificial; identical to SEQ ID NO: 7673
  oligonucleotide probe

SEQ ID NO: 32451 - DNA, 32 bp, Artificial; identical to SEQ ID NO: 7673
  oligonucleotide probe

SEQ ID NO: 32452 - DNA, 32 bp, Artificial; identical to SEQ ID NO: 5160
  oligonucleotide probe

SEQ ID NO: 32453 - DNA, 32 bp, Artificial; identical to SEQ ID NO: 5160
  oligonucleotide probe

SEQ ID NO: 32454 - DNA, 32 bp, Artificial; identical to SEQ ID NO: 5159
  oligonucleotide probe

SEQ ID NO: 32455 - DNA, 32 bp, Artificial; identical to SEQ ID NO: 5159
  oligonucleotide probe

SEQ ID NO: 32456 - DNA, 32 bp, Artificial; identical to SEQ ID NO: 5160
  oligonucleotide probe

SEQ ID NO: 32457 - DNA, 32 bp, Artificial; identical to SEQ ID NO: 5160
  oligonucleotide probe

SEQ ID NO: 32458 - DNA, 32 bp, Artificial; identical to SEQ ID NO: 5399
  oligonucleotide probe

SEQ ID NO: 32459 - DNA, 32 bp, Artificial; identical to SEQ ID NO: 5399
  oligonucleotide probe

SEQ ID NO: 32460 - DNA, 32 bp, Artificial; identical to SEQ ID NO: 7659
  oligonucleotide probe

SEQ ID NO: 32461 - DNA, 32 bp, Artificial; identical to SEQ ID NO: 7659
  oligonucleotide probe

SEQ ID NO: 32462 - DNA, 32 bp, Artificial; identical to SEQ ID NO: 5163
  oligonucleotide probe

SEQ ID NO: 32463 - DNA, 32 bp, Artificial; identical to SEQ ID NO: 5163
  oligonucleotide probe

SEQ ID NO: 32464 - DNA, 32 bp, Artificial; identical to SEQ ID NO: 8834
  oligonucleotide probe

SEQ ID NO: 32465 - DNA, 32 bp, Artificial; identical to SEQ ID NO: 8834
  oligonucleotide probe

SEQ ID NO: 32466 - DNA, 32 bp, Artificial; identical to SEQ ID NO: 7597
  oligonucleotide probe

SEQ ID NO: 32467 - DNA, 32 bp, Artificial; identical to SEQ ID NO: 7597
  oligonucleotide probe

SEQ ID NO: 32468 - DNA, 32 bp, Artificial; identical to SEQ ID NO: 7841
  oligonucleotide probe

SEQ ID NO: 32469 - DNA, 32 bp, Artificial; identical to SEQ ID NO: 7841
  oligonucleotide probe

SEQ ID NO: 32470 - DNA, 32 bp, Artificial; identical to SEQ ID NO: 7838
  oligonucleotide probe

SEQ ID NO: 32471 - DNA, 32 bp, Artificial; identical to SEQ ID NO: 7838
  oligonucleotide probe

SEQ ID NO: 32472 - DNA, 32 bp, Artificial; identical to SEQ ID NO: 7694
  oligonucleotide probe

SEQ ID NO: 32473 - DNA, 32 bp, Artificial; identical to SEQ ID NO: 7694
  oligonucleotide probe

SEQ ID NO: 32474 - DNA, 32 bp, Artificial; identical to SEQ ID NO: 5134
  oligonucleotide probe

SEQ ID NO: 32475 - DNA, 32 bp, Artificial; identical to SEQ ID NO: 5134
  oligonucleotide probe

SEQ ID NO: 32476 - DNA, 32 bp, Artificial; identical to SEQ ID NO: 7605
  oligonucleotide probe

SEQ ID NO: 32477 - DNA, 32 bp, Artificial; identical to SEQ ID NO: 7605
  oligonucleotide probe

SEQ ID NO: 32478 - DNA, 32 bp, Artificial; identical to SEQ ID NO: 7598
  oligonucleotide probe

SEQ ID NO: 32479 - DNA, 32 bp, Artificial; identical to SEQ ID NO: 7598
  oligonucleotide probe

SEQ ID NO: 32480 - DNA, 32 bp, Artificial; identical to SEQ ID NO: 5159
  oligonucleotide probe

SEQ ID NO: 32481 - DNA, 32 bp, Artificial; identical to SEQ ID NO: 5159
  oligonucleotide probe

SEQ ID NO: 32482 - DNA, 32 bp, Artificial; identical to SEQ ID NO: 7594
  oligonucleotide probe

SEQ ID NO: 32483 - DNA, 32 bp, Artificial; identical to SEQ ID NO: 7594
  oligonucleotide probe

SEQ ID NO: 32484 - DNA, 32 bp, Artificial; identical to SEQ ID NO: 5171
  oligonucleotide probe

SEQ ID NO: 32485 - DNA, 32 bp, Artificial; identical to SEQ ID NO: 5171
  oligonucleotide probe

SEQ ID NO: 32486 - DNA, 32 bp, Artificial; identical to SEQ ID NO: 8001
  oligonucleotide probe

SEQ ID NO: 32487 - DNA, 32 bp, Artificial; identical to SEQ ID NO: 8001
  oligonucleotide probe

SEQ ID NO: 32488 - DNA, 32 bp, Artificial; identical to SEQ ID NO: 7694
  oligonucleotide probe

SEQ ID NO: 32489 - DNA, 32 bp, Artificial; identical to SEQ ID NO: 7694
  oligonucleotide probe

SEQ ID NO: 32490 - DNA, 32 bp, Artificial; identical to SEQ ID NO: 5140
  oligonucleotide probe

SEQ ID NO: 32491 - DNA, 32 bp, Artificial; identical to SEQ ID NO: 5140
  oligonucleotide probe

SEQ ID NO: 32492 - DNA, 32 bp, Artificial; identical to SEQ ID NO: 7831
  oligonucleotide probe

SEQ ID NO: 32493 - DNA, 32 bp, Artificial; identical to SEQ ID NO: 7831
  oligonucleotide probe

SEQ ID NO: 32494 - DNA, 32 bp, Artificial; identical to SEQ ID NO: 5141
  oligonucleotide probe

SEQ ID NO: 32495 - DNA, 32 bp, Artificial; identical to SEQ ID NO: 5141
  oligonucleotide probe

SEQ ID NO: 32496 - DNA, 32 bp, Artificial; identical to SEQ ID NO: 5163
  oligonucleotide probe

SEQ ID NO: 32497 - DNA, 32 bp, Artificial; identical to SEQ ID NO: 5163
  oligonucleotide probe

SEQ ID NO: 32498 - DNA, 32 bp, Artificial; identical to SEQ ID NO: 7596
  oligonucleotide probe

SEQ ID NO: 32499 - DNA, 32 bp, Artificial; identical to SEQ ID NO: 7596
  oligonucleotide probe

SEQ ID NO: 32500 - DNA, 32 bp, Artificial; identical to SEQ ID NO: 5185
  oligonucleotide probe

SEQ ID NO: 32501 - DNA, 32 bp, Artificial; identical to SEQ ID NO: 5185
  oligonucleotide probe

SEQ ID NO: 32502 - DNA, 32 bp, Artificial; identical to SEQ ID NO: 8442
  oligonucleotide probe

SEQ ID NO: 32503 - DNA, 32 bp, Artificial; identical to SEQ ID NO: 8442
  oligonucleotide probe

SEQ ID NO: 32504 - DNA, 32 bp, Artificial; identical to SEQ ID NO: 8247
  oligonucleotide probe

SEQ ID NO: 32505 - DNA, 32 bp, Artificial; identical to SEQ ID NO: 8247
  oligonucleotide probe

SEQ ID NO: 32506 - DNA, 32 bp, Artificial; identical to SEQ ID NO: 7673
  oligonucleotide probe

SEQ ID NO: 32507 - DNA, 32 bp, Artificial; identical to SEQ ID NO: 7673
  oligonucleotide probe

SEQ ID NO: 32508 - DNA, 32 bp, Artificial; identical to SEQ ID NO: 7905
  oligonucleotide probe

SEQ ID NO: 32509 - DNA, 32 bp, Artificial; identical to SEQ ID NO: 7905
  oligonucleotide probe

SEQ ID NO: 32510 - DNA, 32 bp, Artificial; identical to SEQ ID NO: 7662
  oligonucleotide probe

SEQ ID NO: 32511 - DNA, 32 bp, Artificial; identical to SEQ ID NO: 7662
  oligonucleotide probe

SEQ ID NO: 32512 - DNA, 32 bp, Artificial; identical to SEQ ID NO: 7690
  oligonucleotide probe

SEQ ID NO: 32513 - DNA, 32 bp, Artificial; identical to SEQ ID NO: 7690
  oligonucleotide probe

SEQ ID NO: 32514 - DNA, 32 bp, Artificial; identical to SEQ ID NO: 5160
  oligonucleotide probe

SEQ ID NO: 32515 - DNA, 32 bp, Artificial; identical to SEQ ID NO: 5160
  oligonucleotide probe

SEQ ID NO: 32516 - DNA, 32 bp, Artificial; identical to SEQ ID NO: 7690
  oligonucleotide probe

SEQ ID NO: 32517 - DNA, 32 bp, Artificial; identical to SEQ ID NO: 7690
  oligonucleotide probe

SEQ ID NO: 32518 - DNA, 32 bp, Artificial; identical to SEQ ID NO: 5223
  oligonucleotide probe

SEQ ID NO: 32519 - DNA, 32 bp, Artificial; identical to SEQ ID NO: 5223
  oligonucleotide probe

SEQ ID NO: 32520 - DNA, 32 bp, Artificial; identical to SEQ ID NO: 5185
  oligonucleotide probe

SEQ ID NO: 32521 - DNA, 32 bp, Artificial; identical to SEQ ID NO: 5185
  oligonucleotide probe

SEQ ID NO: 32522 - DNA, 32 bp, Artificial; identical to SEQ ID NO: 5217
  oligonucleotide probe

SEQ ID NO: 32523 - DNA, 32 bp, Artificial; identical to SEQ ID NO: 5217
  oligonucleotide probe

SEQ ID NO: 32524 - DNA, 32 bp, Artificial; identical to SEQ ID NO: 5231
  oligonucleotide probe

SEQ ID NO: 32525 - DNA, 32 bp, Artificial; identical to SEQ ID NO: 5231
  oligonucleotide probe

SEQ ID NO: 32526 - DNA, 32 bp, Artificial; identical to SEQ ID NO: 7655
  oligonucleotide probe

SEQ ID NO: 32527 - DNA, 32 bp, Artificial; identical to SEQ ID NO: 7655
  oligonucleotide probe

SEQ ID NO: 32528 - DNA, 32 bp, Artificial; identical to SEQ ID NO: 5171
  oligonucleotide probe

SEQ ID NO: 32529 - DNA, 32 bp, Artificial; identical to SEQ ID NO: 5171
  oligonucleotide probe

SEQ ID NO: 32530 - DNA, 32 bp, Artificial; identical to SEQ ID NO: 5134
  oligonucleotide probe

SEQ ID NO: 32531 - DNA, 32 bp, Artificial; identical to SEQ ID NO: 5134
  oligonucleotide probe

SEQ ID NO: 32532 - DNA, 32 bp, Artificial; identical to SEQ ID NO: 7812
  oligonucleotide probe

SEQ ID NO: 32533 - DNA, 32 bp, Artificial; identical to SEQ ID NO: 7812
  oligonucleotide probe

SEQ ID NO: 32534 - DNA, 32 bp, Artificial; identical to SEQ ID NO: 5159
  oligonucleotide probe

SEQ ID NO: 32535 - DNA, 32 bp, Artificial; identical to SEQ ID NO: 5159
  oligonucleotide probe

SEQ ID NO: 32536 - DNA, 32 bp, Artificial; identical to SEQ ID NO: 7598
  oligonucleotide probe

SEQ ID NO: 32537 - DNA, 32 bp, Artificial; identical to SEQ ID NO: 7598
  oligonucleotide probe

SEQ ID NO: 32538 - DNA, 32 bp, Artificial; identical to SEQ ID NO: 7905
  oligonucleotide probe

SEQ ID NO: 32539 - DNA, 32 bp, Artificial; identical to SEQ ID NO: 7905
  oligonucleotide probe

SEQ ID NO: 32540 - DNA, 32 bp, Artificial; identical to SEQ ID NO: 7835
  oligonucleotide probe

SEQ ID NO: 32541 - DNA, 32 bp, Artificial; identical to SEQ ID NO: 7835
  oligonucleotide probe

SEQ ID NO: 32542 - DNA, 32 bp, Artificial; identical to SEQ ID NO: 5171
  oligonucleotide probe

SEQ ID NO: 32543 - DNA, 32 bp, Artificial; identical to SEQ ID NO: 5171
  oligonucleotide probe

SEQ ID NO: 32544 - DNA, 32 bp, Artificial; identical to SEQ ID NO: 8247
  oligonucleotide probe

SEQ ID NO: 32545 - DNA, 32 bp, Artificial; identical to SEQ ID NO: 8247
  oligonucleotide probe

SEQ ID NO: 32546 - DNA, 32 bp, Artificial; identical to SEQ ID NO: 8868
  oligonucleotide probe

SEQ ID NO: 32547 - DNA, 32 bp, Artificial; identical to SEQ ID NO: 8868
  oligonucleotide probe

SEQ ID NO: 32548 - DNA, 32 bp, Artificial; identical to SEQ ID NO: 5134
  oligonucleotide probe

SEQ ID NO: 32549 - DNA, 32 bp, Artificial; identical to SEQ ID NO: 5134
  oligonucleotide probe

SEQ ID NO: 32550 - DNA, 32 bp, Artificial; identical to SEQ ID NO: 7690
  oligonucleotide probe

SEQ ID NO: 32551 - DNA, 32 bp, Artificial; identical to SEQ ID NO: 7690
  oligonucleotide probe

SEQ ID NO: 32552 - DNA, 32 bp, Artificial; identical to SEQ ID NO: 5159
  oligonucleotide probe

SEQ ID NO: 32553 - DNA, 32 bp, Artificial; identical to SEQ ID NO: 5159
  oligonucleotide probe

SEQ ID NO: 32554 - DNA, 32 bp, Artificial; identical to SEQ ID NO: 5239
  oligonucleotide probe

SEQ ID NO: 32555 - DNA, 32 bp, Artificial; identical to SEQ ID NO: 5239
  oligonucleotide probe

SEQ ID NO: 32556 - DNA, 32 bp, Artificial; identical to SEQ ID NO: 7855
  oligonucleotide probe

SEQ ID NO: 32557 - DNA, 32 bp, Artificial; identical to SEQ ID NO: 7855
  oligonucleotide probe

SEQ ID NO: 32558 - DNA, 32 bp, Artificial; identical to SEQ ID NO: 8240
  oligonucleotide probe

SEQ ID NO: 32559 - DNA, 32 bp, Artificial; identical to SEQ ID NO: 8240
  oligonucleotide probe

SEQ ID NO: 32560 - DNA, 32 bp, Artificial; identical to SEQ ID NO: 7690
  oligonucleotide probe

SEQ ID NO: 32561 - DNA, 32 bp, Artificial; identical to SEQ ID NO: 7690
  oligonucleotide probe

SEQ ID NO: 32562 - DNA, 32 bp, Artificial; identical to SEQ ID NO: 5163
  oligonucleotide probe

SEQ ID NO: 32563 - DNA, 32 bp, Artificial; identical to SEQ ID NO: 5163
  oligonucleotide probe

SEQ ID NO: 32564 - DNA, 32 bp, Artificial; identical to SEQ ID NO: 7624
  oligonucleotide probe

SEQ ID NO: 32565 - DNA, 32 bp, Artificial; identical to SEQ ID NO: 7624
  oligonucleotide probe

SEQ ID NO: 32566 - DNA, 32 bp, Artificial; identical to SEQ ID NO: 5141
  oligonucleotide probe

SEQ ID NO: 32567 - DNA, 32 bp, Artificial; identical to SEQ ID NO: 5141
  oligonucleotide probe

SEQ ID NO: 32568 - DNA, 32 bp, Artificial; identical to SEQ ID NO: 7673
  oligonucleotide probe

SEQ ID NO: 32569 - DNA, 32 bp, Artificial; identical to SEQ ID NO: 7673
  oligonucleotide probe

SEQ ID NO: 32570 - DNA, 32 bp, Artificial; identical to SEQ ID NO: 7673
  oligonucleotide probe

SEQ ID NO: 32571 - DNA, 32 bp, Artificial; identical to SEQ ID NO: 7673
  oligonucleotide probe

SEQ ID NO: 32572 - DNA, 32 bp, Artificial; identical to SEQ ID NO: 5185
  oligonucleotide probe

SEQ ID NO: 32573 - DNA, 32 bp, Artificial; identical to SEQ ID NO: 5185
  oligonucleotide probe

SEQ ID NO: 32574 - DNA, 32 bp, Artificial; identical to SEQ ID NO: 7690
  oligonucleotide probe

SEQ ID NO: 32575 - DNA, 32 bp, Artificial; identical to SEQ ID NO: 7690
  oligonucleotide probe

SEQ ID NO: 32576 - DNA, 32 bp, Artificial; identical to SEQ ID NO: 7866
  oligonucleotide probe

SEQ ID NO: 32577 - DNA, 32 bp, Artificial; identical to SEQ ID NO: 7866
  oligonucleotide probe

SEQ ID NO: 32578 - DNA, 32 bp, Artificial; identical to SEQ ID NO: 5160
  oligonucleotide probe

SEQ ID NO: 32579 - DNA, 32 bp, Artificial; identical to SEQ ID NO: 5160
  oligonucleotide probe

SEQ ID NO: 32580 - DNA, 32 bp, Artificial; identical to SEQ ID NO: 7605
  oligonucleotide probe

SEQ ID NO: 32581 - DNA, 32 bp, Artificial; identical to SEQ ID NO: 7605
  oligonucleotide probe

SEQ ID NO: 32582 - DNA, 32 bp, Artificial; identical to SEQ ID NO: 7662
  oligonucleotide probe

SEQ ID NO: 32583 - DNA, 32 bp, Artificial; identical to SEQ ID NO: 7662
  oligonucleotide probe

SEQ ID NO: 32584 - DNA, 32 bp, Artificial; identical to SEQ ID NO: 7947
  oligonucleotide probe

SEQ ID NO: 32585 - DNA, 32 bp, Artificial; identical to SEQ ID NO: 7947
  oligonucleotide probe

SEQ ID NO: 32586 - DNA, 32 bp, Artificial; identical to SEQ ID NO: 7831
  oligonucleotide probe

SEQ ID NO: 32587 - DNA, 32 bp, Artificial; identical to SEQ ID NO: 7831
  oligonucleotide probe

SEQ ID NO: 32588 - DNA, 32 bp, Artificial; identical to SEQ ID NO: 5140
  oligonucleotide probe

SEQ ID NO: 32589 - DNA, 32 bp, Artificial; identical to SEQ ID NO: 5140
  oligonucleotide probe

SEQ ID NO: 32590 - DNA, 32 bp, Artificial; identical to SEQ ID NO: 7838
  oligonucleotide probe

SEQ ID NO: 32591 - DNA, 32 bp, Artificial; identical to SEQ ID NO: 7838
  oligonucleotide probe

SEQ ID NO: 32592 - DNA, 32 bp, Artificial; identical to SEQ ID NO: 7655
  oligonucleotide probe

SEQ ID NO: 32593 - DNA, 32 bp, Artificial; identical to SEQ ID NO: 7655
  oligonucleotide probe

SEQ ID NO: 32594 - DNA, 32 bp, Artificial; identical to SEQ ID NO: 8467
  oligonucleotide probe

SEQ ID NO: 32595 - DNA, 32 bp, Artificial; identical to SEQ ID NO: 8467
  oligonucleotide probe

SEQ ID NO: 32596 - DNA, 32 bp, Artificial; identical to SEQ ID NO: 7694
  oligonucleotide probe

SEQ ID NO: 32597 - DNA, 32 bp, Artificial; identical to SEQ ID NO: 7694
  oligonucleotide probe

SEQ ID NO: 32598 - DNA, 32 bp, Artificial; identical to SEQ ID NO: 8047
  oligonucleotide probe

SEQ ID NO: 32599 - DNA, 32 bp, Artificial; identical to SEQ ID NO: 8047
  oligonucleotide probe

SEQ ID NO: 32600 - DNA, 32 bp, Artificial; identical to SEQ ID NO: 5160
  oligonucleotide probe

SEQ ID NO: 32601 - DNA, 32 bp, Artificial; identical to SEQ ID NO: 5160
  oligonucleotide probe

SEQ ID NO: 32602 - DNA, 32 bp, Artificial; identical to SEQ ID NO: 7783
  oligonucleotide probe

SEQ ID NO: 32603 - DNA, 32 bp, Artificial; identical to SEQ ID NO: 7783
  oligonucleotide probe

SEQ ID NO: 32604 - DNA, 32 bp, Artificial; identical to SEQ ID NO: 7623
  oligonucleotide probe

SEQ ID NO: 32605 - DNA, 32 bp, Artificial; identical to SEQ ID NO: 7623
  oligonucleotide probe

SEQ ID NO: 32606 - DNA, 32 bp, Artificial; identical to SEQ ID NO: 5141
  oligonucleotide probe

SEQ ID NO: 32607 - DNA, 32 bp, Artificial; identical to SEQ ID NO: 5141
  oligonucleotide probe

SEQ ID NO: 32608 - DNA, 32 bp, Artificial; identical to SEQ ID NO: 7947
  oligonucleotide probe

SEQ ID NO: 32609 - DNA, 32 bp, Artificial; identical to SEQ ID NO: 7947
  oligonucleotide probe

SEQ ID NO: 32610 - DNA, 32 bp, Artificial; identical to SEQ ID NO: 7673
  oligonucleotide probe

SEQ ID NO: 32611 - DNA, 32 bp, Artificial; identical to SEQ ID NO: 7673
  oligonucleotide probe

SEQ ID NO: 32612 - DNA, 32 bp, Artificial; identical to SEQ ID NO: 7659
  oligonucleotide probe

SEQ ID NO: 32613 - DNA, 32 bp, Artificial; identical to SEQ ID NO: 7659
  oligonucleotide probe

SEQ ID NO: 32614 - DNA, 32 bp, Artificial; identical to SEQ ID NO: 5171
  oligonucleotide probe

SEQ ID NO: 32615 - DNA, 32 bp, Artificial; identical to SEQ ID NO: 5171
  oligonucleotide probe

SEQ ID NO: 32616 - DNA, 32 bp, Artificial; identical to SEQ ID NO: 5159
  oligonucleotide probe

SEQ ID NO: 32617 - DNA, 32 bp, Artificial; identical to SEQ ID NO: 5159
  oligonucleotide probe

SEQ ID NO: 32618 - DNA, 32 bp, Artificial; identical to SEQ ID NO: 7594
  oligonucleotide probe

SEQ ID NO: 32619 - DNA, 32 bp, Artificial; identical to SEQ ID NO: 7594
  oligonucleotide probe

SEQ ID NO: 32620 - DNA, 32 bp, Artificial; identical to SEQ ID NO: 7662
  oligonucleotide probe

SEQ ID NO: 32621 - DNA, 32 bp, Artificial; identical to SEQ ID NO: 7662
  oligonucleotide probe

SEQ ID NO: 32622 - DNA, 32 bp, Artificial; identical to SEQ ID NO: 7865
  oligonucleotide probe

SEQ ID NO: 32623 - DNA, 32 bp, Artificial; identical to SEQ ID NO: 7865
  oligonucleotide probe

SEQ ID NO: 32624 - DNA, 32 bp, Artificial; identical to SEQ ID NO: 7690
  oligonucleotide probe

SEQ ID NO: 32625 - DNA, 32 bp, Artificial; identical to SEQ ID NO: 7690
  oligonucleotide probe

SEQ ID NO: 32626 - DNA, 32 bp, Artificial; identical to SEQ ID NO: 7835
  oligonucleotide probe

SEQ ID NO: 32627 - DNA, 32 bp, Artificial; identical to SEQ ID NO: 7835
  oligonucleotide probe

SEQ ID NO: 32628 - DNA, 32 bp, Artificial; identical to SEQ ID NO: 8776
  oligonucleotide probe

SEQ ID NO: 32629 - DNA, 32 bp, Artificial; identical to SEQ ID NO: 8777
  oligonucleotide probe

SEQ ID NO: 32630 - DNA, 32 bp, Artificial; identical to SEQ ID NO: 5133
  oligonucleotide probe

SEQ ID NO: 32631 - DNA, 32 bp, Artificial; identical to SEQ ID NO: 5133
  oligonucleotide probe

SEQ ID NO: 32632 - DNA, 32 bp, Artificial; identical to SEQ ID NO: 7853
  oligonucleotide probe

SEQ ID NO: 32633 - DNA, 32 bp, Artificial; identical to SEQ ID NO: 7853
  oligonucleotide probe

SEQ ID NO: 32634 - DNA, 32 bp, Artificial; identical to SEQ ID NO: 7605
  oligonucleotide probe

SEQ ID NO: 32635 - DNA, 32 bp, Artificial; identical to SEQ ID NO: 7605
  oligonucleotide probe

SEQ ID NO: 32636 - DNA, 32 bp, Artificial; identical to SEQ ID NO: 7783
  oligonucleotide probe

SEQ ID NO: 32637 - DNA, 32 bp, Artificial; identical to SEQ ID NO: 7783
  oligonucleotide probe

SEQ ID NO: 32638 - DNA, 32 bp, Artificial; identical to SEQ ID NO: 7662
  oligonucleotide probe

SEQ ID NO: 32639 - DNA, 32 bp, Artificial; identical to SEQ ID NO: 7662
  oligonucleotide probe

SEQ ID NO: 32640 - DNA, 32 bp, Artificial; identical to SEQ ID NO: 5171
  oligonucleotide probe

SEQ ID NO: 32641 - DNA, 32 bp, Artificial; identical to SEQ ID NO: 5171
  oligonucleotide probe

SEQ ID NO: 32642 - DNA, 32 bp, Artificial; identical to SEQ ID NO: 5185
  oligonucleotide probe

SEQ ID NO: 32643 - DNA, 32 bp, Artificial; identical to SEQ ID NO: 5185
  oligonucleotide probe

SEQ ID NO: 32644 - DNA, 32 bp, Artificial; identical to SEQ ID NO: 5136
  oligonucleotide probe

SEQ ID NO: 32645 - DNA, 32 bp, Artificial; identical to SEQ ID NO: 5136
  oligonucleotide probe

SEQ ID NO: 32646 - DNA, 32 bp, Artificial; identical to SEQ ID NO: 7673
  oligonucleotide probe

SEQ ID NO: 32647 - DNA, 32 bp, Artificial; identical to SEQ ID NO: 7673
  oligonucleotide probe

SEQ ID NO: 32648 - DNA, 32 bp, Artificial; identical to SEQ ID NO: 7655
  oligonucleotide probe

SEQ ID NO: 32649 - DNA, 32 bp, Artificial; identical to SEQ ID NO: 7655
  oligonucleotide probe

SEQ ID NO: 32650 - DNA, 32 bp, Artificial; identical to SEQ ID NO: 8442
  oligonucleotide probe

SEQ ID NO: 32651 - DNA, 32 bp, Artificial; identical to SEQ ID NO: 8442
  oligonucleotide probe

SEQ ID NO: 32652 - DNA, 32 bp, Artificial; identical to SEQ ID NO: 7783
  oligonucleotide probe

SEQ ID NO: 32653 - DNA, 32 bp, Artificial; identical to SEQ ID NO: 7783
  oligonucleotide probe

SEQ ID NO: 32654 - DNA, 32 bp, Artificial; identical to SEQ ID NO: 7673
  oligonucleotide probe

SEQ ID NO: 32655 - DNA, 32 bp, Artificial; identical to SEQ ID NO: 7673
  oligonucleotide probe

SEQ ID NO: 32656 - DNA, 32 bp, Artificial; identical to SEQ ID NO: 7596
  oligonucleotide probe

SEQ ID NO: 32657 - DNA, 32 bp, Artificial; identical to SEQ ID NO: 7596
  oligonucleotide probe

SEQ ID NO: 32658 - DNA, 32 bp, Artificial; identical to SEQ ID NO: 7841
  oligonucleotide probe

SEQ ID NO: 32659 - DNA, 32 bp, Artificial; identical to SEQ ID NO: 7841
  oligonucleotide probe

SEQ ID NO: 32660 - DNA, 32 bp, Artificial; identical to SEQ ID NO: 5141
  oligonucleotide probe

SEQ ID NO: 32661 - DNA, 32 bp, Artificial; identical to SEQ ID NO: 5141
  oligonucleotide probe

SEQ ID NO: 32662 - DNA, 32 bp, Artificial; identical to SEQ ID NO: 7833
  oligonucleotide probe

SEQ ID NO: 32663 - DNA, 32 bp, Artificial; identical to SEQ ID NO: 7833
  oligonucleotide probe

SEQ ID NO: 32664 - DNA, 32 bp, Artificial; identical to SEQ ID NO: 5171
  oligonucleotide probe

SEQ ID NO: 32665 - DNA, 32 bp, Artificial; identical to SEQ ID NO: 5171
  oligonucleotide probe

SEQ ID NO: 32666 - DNA, 32 bp, Artificial; identical to SEQ ID NO: 7594
  oligonucleotide probe

SEQ ID NO: 32667 - DNA, 32 bp, Artificial; identical to SEQ ID NO: 7594
  oligonucleotide probe

SEQ ID NO: 32668 - DNA, 32 bp, Artificial; identical to SEQ ID NO: 7624
  oligonucleotide probe

SEQ ID NO: 32669 - DNA, 32 bp, Artificial; identical to SEQ ID NO: 7624
  oligonucleotide probe

SEQ ID NO: 32670 - DNA, 32 bp, Artificial; identical to SEQ ID NO: 5223
  oligonucleotide probe

SEQ ID NO: 32671 - DNA, 32 bp, Artificial; identical to SEQ ID NO: 5223
  oligonucleotide probe

SEQ ID NO: 32672 - DNA, 32 bp, Artificial; identical to SEQ ID NO: 5141
  oligonucleotide probe

SEQ ID NO: 32673 - DNA, 32 bp, Artificial; identical to SEQ ID NO: 5141
  oligonucleotide probe

SEQ ID NO: 32674 - DNA, 32 bp, Artificial; identical to SEQ ID NO: 7905
  oligonucleotide probe

SEQ ID NO: 32675 - DNA, 32 bp, Artificial; identical to SEQ ID NO: 7905
  oligonucleotide probe

SEQ ID NO: 32676 - DNA, 32 bp, Artificial; identical to SEQ ID NO: 7605
  oligonucleotide probe

SEQ ID NO: 32677 - DNA, 32 bp, Artificial; identical to SEQ ID NO: 7605
  oligonucleotide probe

SEQ ID NO: 32678 - DNA, 32 bp, Artificial; identical to SEQ ID NO: 7855
  oligonucleotide probe

SEQ ID NO: 32679 - DNA, 32 bp, Artificial; identical to SEQ ID NO: 7855
  oligonucleotide probe

SEQ ID NO: 32680 - DNA, 32 bp, Artificial; identical to SEQ ID NO: 7842
  oligonucleotide probe

SEQ ID NO: 32681 - DNA, 32 bp, Artificial; identical to SEQ ID NO: 7842
  oligonucleotide probe

SEQ ID NO: 32682 - DNA, 32 bp, Artificial; identical to SEQ ID NO: 7840
  oligonucleotide probe

SEQ ID NO: 32683 - DNA, 32 bp, Artificial; identical to SEQ ID NO: 7840
  oligonucleotide probe

SEQ ID NO: 32684 - DNA, 32 bp, Artificial; identical to SEQ ID NO: 5136
  oligonucleotide probe

SEQ ID NO: 32685 - DNA, 32 bp, Artificial; identical to SEQ ID NO: 5136
  oligonucleotide probe

SEQ ID NO: 32686 - DNA, 32 bp, Artificial; identical to SEQ ID NO: 8247
  oligonucleotide probe

SEQ ID NO: 32687 - DNA, 32 bp, Artificial; identical to SEQ ID NO: 8247
  oligonucleotide probe

SEQ ID NO: 32688 - DNA, 32 bp, Artificial; identical to SEQ ID NO: 5239
  oligonucleotide probe

SEQ ID NO: 32689 - DNA, 32 bp, Artificial; identical to SEQ ID NO: 5239
  oligonucleotide probe

SEQ ID NO: 32690 - DNA, 32 bp, Artificial; identical to SEQ ID NO: 5159
  oligonucleotide probe

SEQ ID NO: 32691 - DNA, 32 bp, Artificial; identical to SEQ ID NO: 5159
  oligonucleotide probe

SEQ ID NO: 32692 - DNA, 32 bp, Artificial; identical to SEQ ID NO: 7624
  oligonucleotide probe

SEQ ID NO: 32693 - DNA, 32 bp, Artificial; identical to SEQ ID NO: 7624
  oligonucleotide probe

SEQ ID NO: 32694 - DNA, 32 bp, Artificial; identical to SEQ ID NO: 7673
  oligonucleotide probe

SEQ ID NO: 32695 - DNA, 32 bp, Artificial; identical to SEQ ID NO: 7673
  oligonucleotide probe

SEQ ID NO: 32696 - DNA, 32 bp, Artificial; identical to SEQ ID NO: 5171
  oligonucleotide probe

SEQ ID NO: 32697 - DNA, 32 bp, Artificial; identical to SEQ ID NO: 5171
  oligonucleotide probe

SEQ ID NO: 32698 - DNA, 32 bp, Artificial; identical to SEQ ID NO: 7644
  oligonucleotide probe

SEQ ID NO: 32699 - DNA, 32 bp, Artificial; identical to SEQ ID NO: 7644
  oligonucleotide probe

SEQ ID NO: 32700 - DNA, 32 bp, Artificial; identical to SEQ ID NO: 7841
  oligonucleotide probe

SEQ ID NO: 32701 - DNA, 32 bp, Artificial; identical to SEQ ID NO: 7841
  oligonucleotide probe

SEQ ID NO: 32702 - DNA, 32 bp, Artificial; identical to SEQ ID NO: 8467
  oligonucleotide probe

SEQ ID NO: 32703 - DNA, 32 bp, Artificial; identical to SEQ ID NO: 8467
  oligonucleotide probe

SEQ ID NO: 32704 - DNA, 32 bp, Artificial; identical to SEQ ID NO: 8244
  oligonucleotide probe

SEQ ID NO: 32705 - DNA, 32 bp, Artificial; identical to SEQ ID NO: 8244
  oligonucleotide probe

SEQ ID NO: 32706 - DNA, 32 bp, Artificial; identical to SEQ ID NO: 5134
  oligonucleotide probe

SEQ ID NO: 32707 - DNA, 32 bp, Artificial; identical to SEQ ID NO: 5134
  oligonucleotide probe

SEQ ID NO: 32708 - DNA, 32 bp, Artificial; identical to SEQ ID NO: 5185
  oligonucleotide probe

SEQ ID NO: 32709 - DNA, 32 bp, Artificial; identical to SEQ ID NO: 5185
  oligonucleotide probe

SEQ ID NO: 32710 - DNA, 32 bp, Artificial; identical to SEQ ID NO: 7812
  oligonucleotide probe

SEQ ID NO: 32711 - DNA, 32 bp, Artificial; identical to SEQ ID NO: 7812
  oligonucleotide probe

SEQ ID NO: 32712 - DNA, 32 bp, Artificial; identical to SEQ ID NO: 7690
  oligonucleotide probe

SEQ ID NO: 32713 - DNA, 32 bp, Artificial; identical to SEQ ID NO: 7690
  oligonucleotide probe

SEQ ID NO: 32714 - DNA, 32 bp, Artificial; identical to SEQ ID NO: 5159
  oligonucleotide probe

SEQ ID NO: 32715 - DNA, 32 bp, Artificial; identical to SEQ ID NO: 5159
  oligonucleotide probe

SEQ ID NO: 32716 - DNA, 32 bp, Artificial; identical to SEQ ID NO: 5133
  oligonucleotide probe

SEQ ID NO: 32717 - DNA, 32 bp, Artificial; identical to SEQ ID NO: 5133
  oligonucleotide probe

SEQ ID NO: 32718 - DNA, 32 bp, Artificial; identical to SEQ ID NO: 5171
  oligonucleotide probe

SEQ ID NO: 32719 - DNA, 32 bp, Artificial; identical to SEQ ID NO: 5171
  oligonucleotide probe

SEQ ID NO: 32720 - DNA, 32 bp, Artificial; identical to SEQ ID NO: 7673
  oligonucleotide probe

SEQ ID NO: 32721 - DNA, 32 bp, Artificial; identical to SEQ ID NO: 7673
  oligonucleotide probe

SEQ ID NO: 32722 - DNA, 32 bp, Artificial; identical to SEQ ID NO: 7598
  oligonucleotide probe

SEQ ID NO: 32723 - DNA, 32 bp, Artificial; identical to SEQ ID NO: 7598
  oligonucleotide probe

SEQ ID NO: 32724 - DNA, 32 bp, Artificial; identical to SEQ ID NO: 5140
  oligonucleotide probe

SEQ ID NO: 32725 - DNA, 32 bp, Artificial; identical to SEQ ID NO: 5140
  oligonucleotide probe

SEQ ID NO: 32726 - DNA, 32 bp, Artificial; identical to SEQ ID NO: 8244
  oligonucleotide probe

SEQ ID NO: 32727 - DNA, 32 bp, Artificial; identical to SEQ ID NO: 8244
  oligonucleotide probe

SEQ ID NO: 32728 - DNA, 32 bp, Artificial; identical to SEQ ID NO: 8001
  oligonucleotide probe

SEQ ID NO: 32729 - DNA, 32 bp, Artificial; identical to SEQ ID NO: 8001
  oligonucleotide probe

SEQ ID NO: 32730 - DNA, 32 bp, Artificial; identical to SEQ ID NO: 7673
  oligonucleotide probe

SEQ ID NO: 32731 - DNA, 32 bp, Artificial; identical to SEQ ID NO: 7673
  oligonucleotide probe

SEQ ID NO: 32732 - DNA, 32 bp, Artificial; identical to SEQ ID NO: 8571
  oligonucleotide probe

SEQ ID NO: 32733 - DNA, 32 bp, Artificial; identical to SEQ ID NO: 8571
  oligonucleotide probe

SEQ ID NO: 32734 - DNA, 32 bp, Artificial; identical to SEQ ID NO: 7690
  oligonucleotide probe

SEQ ID NO: 32735 - DNA, 32 bp, Artificial; identical to SEQ ID NO: 7690
  oligonucleotide probe

SEQ ID NO: 32736 - DNA, 32 bp, Artificial; identical to SEQ ID NO: 5231
  oligonucleotide probe

SEQ ID NO: 32737 - DNA, 32 bp, Artificial; identical to SEQ ID NO: 5231
  oligonucleotide probe

SEQ ID NO: 32738 - DNA, 32 bp, Artificial; identical to SEQ ID NO: 7673
  oligonucleotide probe

SEQ ID NO: 32739 - DNA, 32 bp, Artificial; identical to SEQ ID NO: 7673
  oligonucleotide probe

SEQ ID NO: 32740 - DNA, 32 bp, Artificial; identical to SEQ ID NO: 7655
  oligonucleotide probe

SEQ ID NO: 32741 - DNA, 32 bp, Artificial; identical to SEQ ID NO: 7655
  oligonucleotide probe

SEQ ID NO: 32742 - DNA, 32 bp, Artificial; identical to SEQ ID NO: 8240
  oligonucleotide probe

SEQ ID NO: 32743 - DNA, 32 bp, Artificial; identical to SEQ ID NO: 8240
  oligonucleotide probe

SEQ ID NO: 32744 - DNA, 32 bp, Artificial; identical to SEQ ID NO: 7596
  oligonucleotide probe

SEQ ID NO: 32745 - DNA, 32 bp, Artificial; identical to SEQ ID NO: 7596
  oligonucleotide probe

SEQ ID NO: 32746 - DNA, 32 bp, Artificial; identical to SEQ ID NO: 5141
  oligonucleotide probe

SEQ ID NO: 32747 - DNA, 32 bp, Artificial; identical to SEQ ID NO: 5141
  oligonucleotide probe

SEQ ID NO: 32748 - DNA, 32 bp, Artificial; identical to SEQ ID NO: 5163
  oligonucleotide probe

SEQ ID NO: 32749 - DNA, 32 bp, Artificial; identical to SEQ ID NO: 5163
  oligonucleotide probe

SEQ ID NO: 32750 - DNA, 32 bp, Artificial; identical to SEQ ID NO: 7783
  oligonucleotide probe

SEQ ID NO: 32751 - DNA, 32 bp, Artificial; identical to SEQ ID NO: 7783
  oligonucleotide probe

SEQ ID NO: 32752 - DNA, 32 bp, Artificial; identical to SEQ ID NO: 5239
  oligonucleotide probe

SEQ ID NO: 32753 - DNA, 32 bp, Artificial; identical to SEQ ID NO: 5239
  oligonucleotide probe

SEQ ID NO: 32754 - DNA, 32 bp, Artificial; identical to SEQ ID NO: 7812
  oligonucleotide probe

SEQ ID NO: 32755 - DNA, 32 bp, Artificial; identical to SEQ ID NO: 7812
  oligonucleotide probe

SEQ ID NO: 32756 - DNA, 32 bp, Artificial; identical to SEQ ID NO: 7662
  oligonucleotide probe

SEQ ID NO: 32757 - DNA, 32 bp, Artificial; identical to SEQ ID NO: 7662
  oligonucleotide probe

SEQ ID NO: 32758 - DNA, 32 bp, Artificial; identical to SEQ ID NO: 7596
  oligonucleotide probe

SEQ ID NO: 32759 - DNA, 32 bp, Artificial; identical to SEQ ID NO: 7596
  oligonucleotide probe

SEQ ID NO: 32760 - DNA, 32 bp, Artificial; identical to SEQ ID NO: 7623
  oligonucleotide probe

SEQ ID NO: 32761 - DNA, 32 bp, Artificial; identical to SEQ ID NO: 7623
  oligonucleotide probe

SEQ ID NO: 32762 - DNA, 32 bp, Artificial; identical to SEQ ID NO: 7606
  oligonucleotide probe

SEQ ID NO: 32763 - DNA, 32 bp, Artificial; identical to SEQ ID NO: 7606
  oligonucleotide probe

SEQ ID NO: 32764 - DNA, 32 bp, Artificial; identical to SEQ ID NO: 5163
  oligonucleotide probe

SEQ ID NO: 32765 - DNA, 32 bp, Artificial; identical to SEQ ID NO: 5163
  oligonucleotide probe

SEQ ID NO: 32766 - DNA, 32 bp, Artificial; identical to SEQ ID NO: 5185
  oligonucleotide probe

SEQ ID NO: 32767 - DNA, 32 bp, Artificial; identical to SEQ ID NO: 5185
  oligonucleotide probe

SEQ ID NO: 32768 - DNA, 32 bp, Artificial; identical to SEQ ID NO: 7659
  oligonucleotide probe

SEQ ID NO: 32769 - DNA, 32 bp, Artificial; identical to SEQ ID NO: 7659
  oligonucleotide probe

SEQ ID NO: 32770 - DNA, 32 bp, Artificial; identical to SEQ ID NO: 7694
  oligonucleotide probe

SEQ ID NO: 32771 - DNA, 32 bp, Artificial; identical to SEQ ID NO: 7694
  oligonucleotide probe

SEQ ID NO: 32772 - DNA, 32 bp, Artificial; identical to SEQ ID NO: 7783
  oligonucleotide probe

SEQ ID NO: 32773 - DNA, 32 bp, Artificial; identical to SEQ ID NO: 7783
  oligonucleotide probe

SEQ ID NO: 32774 - DNA, 32 bp, Artificial; identical to SEQ ID NO: 7694
  oligonucleotide probe

SEQ ID NO: 32775 - DNA, 32 bp, Artificial; identical to SEQ ID NO: 7694
  oligonucleotide probe

SEQ ID NO: 32776 - DNA, 32 bp, Artificial; identical to SEQ ID NO: 7673
  oligonucleotide probe

SEQ ID NO: 32777 - DNA, 32 bp, Artificial; identical to SEQ ID NO: 7673
  oligonucleotide probe

SEQ ID NO: 32778 - DNA, 32 bp, Artificial; identical to SEQ ID NO: 7597
  oligonucleotide probe

SEQ ID NO: 32779 - DNA, 32 bp, Artificial; identical to SEQ ID NO: 7597
  oligonucleotide probe

SEQ ID NO: 32780 - DNA, 32 bp, Artificial; identical to SEQ ID NO: 7831
  oligonucleotide probe

SEQ ID NO: 32781 - DNA, 32 bp, Artificial; identical to SEQ ID NO: 7831
  oligonucleotide probe

SEQ ID NO: 32782 - DNA, 32 bp, Artificial; identical to SEQ ID NO: 7659
  oligonucleotide probe

SEQ ID NO: 32783 - DNA, 32 bp, Artificial; identical to SEQ ID NO: 7659
  oligonucleotide probe

SEQ ID NO: 32784 - DNA, 32 bp, Artificial; identical to SEQ ID NO: 7863
  oligonucleotide probe

SEQ ID NO: 32785 - DNA, 32 bp, Artificial; identical to SEQ ID NO: 7863
  oligonucleotide probe

SEQ ID NO: 32786 - DNA, 32 bp, Artificial; identical to SEQ ID NO: 7863
  oligonucleotide probe

SEQ ID NO: 32787 - DNA, 32 bp, Artificial; identical to SEQ ID NO: 7863
  oligonucleotide probe

SEQ ID NO: 32788 - DNA, 32 bp, Artificial; identical to SEQ ID NO: 8247
  oligonucleotide probe

SEQ ID NO: 32789 - DNA, 32 bp, Artificial; identical to SEQ ID NO: 8247
  oligonucleotide probe

SEQ ID NO: 32790 - DNA, 32 bp, Artificial; identical to SEQ ID NO: 7659
  oligonucleotide probe

SEQ ID NO: 32791 - DNA, 32 bp, Artificial; identical to SEQ ID NO: 7659
  oligonucleotide probe

SEQ ID NO: 32792 - DNA, 32 bp, Artificial; identical to SEQ ID NO: 5171
  oligonucleotide probe

SEQ ID NO: 32793 - DNA, 32 bp, Artificial; identical to SEQ ID NO: 5171
  oligonucleotide probe

SEQ ID NO: 32794 - DNA, 32 bp, Artificial; identical to SEQ ID NO: 7673
  oligonucleotide probe

SEQ ID NO: 32795 - DNA, 32 bp, Artificial; identical to SEQ ID NO: 7673
  oligonucleotide probe

SEQ ID NO: 32796 - DNA, 32 bp, Artificial; identical to SEQ ID NO: 5141
  oligonucleotide probe

SEQ ID NO: 32797 - DNA, 32 bp, Artificial; identical to SEQ ID NO: 5141
  oligonucleotide probe

SEQ ID NO: 32798 - DNA, 32 bp, Artificial; identical to SEQ ID NO: 5134
  oligonucleotide probe

SEQ ID NO: 32799 - DNA, 32 bp, Artificial; identical to SEQ ID NO: 5134
  oligonucleotide probe

SEQ ID NO: 32800 - DNA, 32 bp, Artificial; identical to SEQ ID NO: 7623
  oligonucleotide probe

SEQ ID NO: 32801 - DNA, 32 bp, Artificial; identical to SEQ ID NO: 7623
  oligonucleotide probe

SEQ ID NO: 32802 - DNA, 32 bp, Artificial; identical to SEQ ID NO: 5163
  oligonucleotide probe

SEQ ID NO: 32803 - DNA, 32 bp, Artificial; identical to SEQ ID NO: 5163
  oligonucleotide probe

SEQ ID NO: 32804 - DNA, 32 bp, Artificial; identical to SEQ ID NO: 5133
  oligonucleotide probe

SEQ ID NO: 32805 - DNA, 32 bp, Artificial; identical to SEQ ID NO: 5133
  oligonucleotide probe

SEQ ID NO: 32806 - DNA, 32 bp, Artificial; identical to SEQ ID NO: 7694
  oligonucleotide probe

SEQ ID NO: 32807 - DNA, 32 bp, Artificial; identical to SEQ ID NO: 7694
  oligonucleotide probe

SEQ ID NO: 32808 - DNA, 32 bp, Artificial; identical to SEQ ID NO: 8001
  oligonucleotide probe

SEQ ID NO: 32809 - DNA, 32 bp, Artificial; identical to SEQ ID NO: 8001
  oligonucleotide probe

SEQ ID NO: 32810 - DNA, 32 bp, Artificial; identical to SEQ ID NO: 7662
  oligonucleotide probe

SEQ ID NO: 32811 - DNA, 32 bp, Artificial; identical to SEQ ID NO: 7662
  oligonucleotide probe

SEQ ID NO: 32812 - DNA, 32 bp, Artificial; identical to SEQ ID NO: 5163
  oligonucleotide probe

SEQ ID NO: 32813 - DNA, 32 bp, Artificial; identical to SEQ ID NO: 5163
  oligonucleotide probe

SEQ ID NO: 32814 - DNA, 32 bp, Artificial; identical to SEQ ID NO: 7948
  oligonucleotide probe

SEQ ID NO: 32815 - DNA, 32 bp, Artificial; identical to SEQ ID NO: 7948
  oligonucleotide probe

SEQ ID NO: 32816 - DNA, 32 bp, Artificial; identical to SEQ ID NO: 5171
  oligonucleotide probe

SEQ ID NO: 32817 - DNA, 32 bp, Artificial; identical to SEQ ID NO: 5171
  oligonucleotide probe

SEQ ID NO: 32818 - DNA, 32 bp, Artificial; identical to SEQ ID NO: 7644
  oligonucleotide probe

SEQ ID NO: 32819 - DNA, 32 bp, Artificial; identical to SEQ ID NO: 7644
  oligonucleotide probe

SEQ ID NO: 32820 - DNA, 32 bp, Artificial; identical to SEQ ID NO: 7834
  oligonucleotide probe

SEQ ID NO: 32821 - DNA, 32 bp, Artificial; identical to SEQ ID NO: 7834
  oligonucleotide probe

SEQ ID NO: 32822 - DNA, 32 bp, Artificial; identical to SEQ ID NO: 7662
  oligonucleotide probe

SEQ ID NO: 32823 - DNA, 32 bp, Artificial; identical to SEQ ID NO: 7662
  oligonucleotide probe

SEQ ID NO: 32824 - DNA, 32 bp, Artificial; identical to SEQ ID NO: 5141
  oligonucleotide probe

SEQ ID NO: 32825 - DNA, 32 bp, Artificial; identical to SEQ ID NO: 5141
  oligonucleotide probe

SEQ ID NO: 32826 - DNA, 32 bp, Artificial; identical to SEQ ID NO: 7659
  oligonucleotide probe

SEQ ID NO: 32827 - DNA, 32 bp, Artificial; identical to SEQ ID NO: 7659
  oligonucleotide probe

SEQ ID NO: 32828 - DNA, 32 bp, Artificial; identical to SEQ ID NO: 7948
  oligonucleotide probe

SEQ ID NO: 32829 - DNA, 32 bp, Artificial; identical to SEQ ID NO: 7948
  oligonucleotide probe

SEQ ID NO: 32830 - DNA, 32 bp, Artificial; identical to SEQ ID NO: 5416
  oligonucleotide probe

SEQ ID NO: 32831 - DNA, 32 bp, Artificial; identical to SEQ ID NO: 5416
  oligonucleotide probe

SEQ ID NO: 32832 - DNA, 32 bp, Artificial; identical to SEQ ID NO: 7594
  oligonucleotide probe

SEQ ID NO: 32833 - DNA, 32 bp, Artificial; identical to SEQ ID NO: 7594
  oligonucleotide probe

SEQ ID NO: 32834 - DNA, 32 bp, Artificial; identical to SEQ ID NO: 5171
  oligonucleotide probe

SEQ ID NO: 32835 - DNA, 32 bp, Artificial; identical to SEQ ID NO: 5171
  oligonucleotide probe

SEQ ID NO: 32836 - DNA, 32 bp, Artificial; identical to SEQ ID NO: 8244
  oligonucleotide probe

SEQ ID NO: 32837 - DNA, 32 bp, Artificial; identical to SEQ ID NO: 8244
  oligonucleotide probe

SEQ ID NO: 32838 - DNA, 32 bp, Artificial; identical to SEQ ID NO: 7905
  oligonucleotide probe

SEQ ID NO: 32839 - DNA, 32 bp, Artificial; identical to SEQ ID NO: 7905
  oligonucleotide probe

SEQ ID NO: 32840 - DNA, 32 bp, Artificial; identical to SEQ ID NO: 7694
  oligonucleotide probe

SEQ ID NO: 32841 - DNA, 32 bp, Artificial; identical to SEQ ID NO: 7694
  oligonucleotide probe

SEQ ID NO: 32842 - DNA, 32 bp, Artificial; identical to SEQ ID NO: 8442
  oligonucleotide probe

SEQ ID NO: 32843 - DNA, 32 bp, Artificial; identical to SEQ ID NO: 8442
  oligonucleotide probe

SEQ ID NO: 32844 - DNA, 32 bp, Artificial; identical to SEQ ID NO: 7690
  oligonucleotide probe

SEQ ID NO: 32845 - DNA, 32 bp, Artificial; identical to SEQ ID NO: 7690
  oligonucleotide probe

SEQ ID NO: 32846 - DNA, 32 bp, Artificial; identical to SEQ ID NO: 7644
  oligonucleotide probe

SEQ ID NO: 32847 - DNA, 32 bp, Artificial; identical to SEQ ID NO: 7644
  oligonucleotide probe

SEQ ID NO: 32848 - DNA, 32 bp, Artificial; identical to SEQ ID NO: 8247
  oligonucleotide probe

SEQ ID NO: 32849 - DNA, 32 bp, Artificial; identical to SEQ ID NO: 8247
  oligonucleotide probe

SEQ ID NO: 32850 - DNA, 32 bp, Artificial; identical to SEQ ID NO: 7831
  oligonucleotide probe

SEQ ID NO: 32851 - DNA, 32 bp, Artificial; identical to SEQ ID NO: 7831
  oligonucleotide probe

SEQ ID NO: 32852 - DNA, 32 bp, Artificial; identical to SEQ ID NO: 5133
  oligonucleotide probe

SEQ ID NO: 32853 - DNA, 32 bp, Artificial; identical to SEQ ID NO: 5133
  oligonucleotide probe

SEQ ID NO: 32854 - DNA, 32 bp, Artificial; identical to SEQ ID NO: 7624
  oligonucleotide probe

SEQ ID NO: 32855 - DNA, 32 bp, Artificial; identical to SEQ ID NO: 7624
  oligonucleotide probe

SEQ ID NO: 32856 - DNA, 32 bp, Artificial; identical to SEQ ID NO: 7644
  oligonucleotide probe

SEQ ID NO: 32857 - DNA, 32 bp, Artificial; identical to SEQ ID NO: 7644
  oligonucleotide probe

SEQ ID NO: 32858 - DNA, 32 bp, Artificial; identical to SEQ ID NO: 5220
  oligonucleotide probe

SEQ ID NO: 32859 - DNA, 32 bp, Artificial; identical to SEQ ID NO: 5220
  oligonucleotide probe

SEQ ID NO: 32860 - DNA, 32 bp, Artificial; identical to SEQ ID NO: 7690
  oligonucleotide probe

SEQ ID NO: 32861 - DNA, 32 bp, Artificial; identical to SEQ ID NO: 7690
  oligonucleotide probe

SEQ ID NO: 32862 - DNA, 32 bp, Artificial; identical to SEQ ID NO: 5185
  oligonucleotide probe

SEQ ID NO: 32863 - DNA, 32 bp, Artificial; identical to SEQ ID NO: 5185
  oligonucleotide probe

SEQ ID NO: 32864 - DNA, 32 bp, Artificial; identical to SEQ ID NO: 7597
  oligonucleotide probe

SEQ ID NO: 32865 - DNA, 32 bp, Artificial; identical to SEQ ID NO: 7597
  oligonucleotide probe

SEQ ID NO: 32866 - DNA, 32 bp, Artificial; identical to SEQ ID NO: 7833
  oligonucleotide probe

SEQ ID NO: 32867 - DNA, 32 bp, Artificial; identical to SEQ ID NO: 7833
  oligonucleotide probe

SEQ ID NO: 32868 - DNA, 32 bp, Artificial; identical to SEQ ID NO: 7606
  oligonucleotide probe

SEQ ID NO: 32869 - DNA, 32 bp, Artificial; identical to SEQ ID NO: 7606
  oligonucleotide probe

SEQ ID NO: 32870 - DNA, 32 bp, Artificial; identical to SEQ ID NO: 5223
  oligonucleotide probe

SEQ ID NO: 32871 - DNA, 32 bp, Artificial; identical to SEQ ID NO: 5223
  oligonucleotide probe

SEQ ID NO: 32872 - DNA, 32 bp, Artificial; identical to SEQ ID NO: 9252
  oligonucleotide probe

SEQ ID NO: 32873 - DNA, 32 bp, Artificial; identical to SEQ ID NO: 9252
  oligonucleotide probe

SEQ ID NO: 32874 - DNA, 32 bp, Artificial; identical to SEQ ID NO: 7863
  oligonucleotide probe

SEQ ID NO: 32875 - DNA, 32 bp, Artificial; identical to SEQ ID NO: 7863
  oligonucleotide probe

SEQ ID NO: 32876 - DNA, 32 bp, Artificial; identical to SEQ ID NO: 5224
  oligonucleotide probe

SEQ ID NO: 32877 - DNA, 32 bp, Artificial; identical to SEQ ID NO: 5224
  oligonucleotide probe

SEQ ID NO: 32878 - DNA, 32 bp, Artificial; identical to SEQ ID NO: 7840
  oligonucleotide probe

SEQ ID NO: 32879 - DNA, 32 bp, Artificial; identical to SEQ ID NO: 7840
  oligonucleotide probe

SEQ ID NO: 32880 - DNA, 32 bp, Artificial; identical to SEQ ID NO: 7644
  oligonucleotide probe

SEQ ID NO: 32881 - DNA, 32 bp, Artificial; identical to SEQ ID NO: 7644
  oligonucleotide probe

SEQ ID NO: 32882 - DNA, 32 bp, Artificial; identical to SEQ ID NO: 5231
  oligonucleotide probe

SEQ ID NO: 32883 - DNA, 32 bp, Artificial; identical to SEQ ID NO: 5231
  oligonucleotide probe

SEQ ID NO: 32884 - DNA, 32 bp, Artificial; identical to SEQ ID NO: 7624
  oligonucleotide probe

SEQ ID NO: 32885 - DNA, 32 bp, Artificial; identical to SEQ ID NO: 7624
  oligonucleotide probe

SEQ ID NO: 32886 - DNA, 32 bp, Artificial; identical to SEQ ID NO: 7831
  oligonucleotide probe

SEQ ID NO: 32887 - DNA, 32 bp, Artificial; identical to SEQ ID NO: 7831
  oligonucleotide probe

SEQ ID NO: 32888 - DNA, 32 bp, Artificial; identical to SEQ ID NO: 7597
  oligonucleotide probe

SEQ ID NO: 32889 - DNA, 32 bp, Artificial; identical to SEQ ID NO: 7597
  oligonucleotide probe

SEQ ID NO: 32890 - DNA, 32 bp, Artificial; identical to SEQ ID NO: 5217
  oligonucleotide probe

SEQ ID NO: 32891 - DNA, 32 bp, Artificial; identical to SEQ ID NO: 5217
  oligonucleotide probe

SEQ ID NO: 32892 - DNA, 32 bp, Artificial; identical to SEQ ID NO: 7624
  oligonucleotide probe

SEQ ID NO: 32893 - DNA, 32 bp, Artificial; identical to SEQ ID NO: 7624
  oligonucleotide probe

SEQ ID NO: 32894 - DNA, 32 bp, Artificial; identical to SEQ ID NO: 7644
  oligonucleotide probe

SEQ ID NO: 32895 - DNA, 32 bp, Artificial; identical to SEQ ID NO: 7644
  oligonucleotide probe

SEQ ID NO: 32896 - DNA, 32 bp, Artificial; identical to SEQ ID NO: 5171
  oligonucleotide probe

SEQ ID NO: 32897 - DNA, 32 bp, Artificial; identical to SEQ ID NO: 5171
  oligonucleotide probe

SEQ ID NO: 32898 - DNA, 32 bp, Artificial; identical to SEQ ID NO: 7783
  oligonucleotide probe

SEQ ID NO: 32899 - DNA, 32 bp, Artificial; identical to SEQ ID NO: 7783
  oligonucleotide probe

SEQ ID NO: 32900 - DNA, 32 bp, Artificial; identical to SEQ ID NO: 8001
  oligonucleotide probe

SEQ ID NO: 32901 - DNA, 32 bp, Artificial; identical to SEQ ID NO: 8001
  oligonucleotide probe

SEQ ID NO: 32902 - DNA, 32 bp, Artificial; identical to SEQ ID NO: 7690
  oligonucleotide probe

SEQ ID NO: 32903 - DNA, 32 bp, Artificial; identical to SEQ ID NO: 7690
  oligonucleotide probe

SEQ ID NO: 32904 - DNA, 32 bp, Artificial; identical to SEQ ID NO: 5163
  oligonucleotide probe

SEQ ID NO: 32905 - DNA, 32 bp, Artificial; identical to SEQ ID NO: 5163
  oligonucleotide probe

SEQ ID NO: 32906 - DNA, 32 bp, Artificial; identical to SEQ ID NO: 7694
  oligonucleotide probe

SEQ ID NO: 32907 - DNA, 32 bp, Artificial; identical to SEQ ID NO: 7694
  oligonucleotide probe

SEQ ID NO: 32908 - DNA, 32 bp, Artificial; identical to SEQ ID NO: 7606
  oligonucleotide probe

SEQ ID NO: 32909 - DNA, 32 bp, Artificial; identical to SEQ ID NO: 7606
  oligonucleotide probe

SEQ ID NO: 32910 - DNA, 32 bp, Artificial; identical to SEQ ID NO: 7812
  oligonucleotide probe

SEQ ID NO: 32911 - DNA, 32 bp, Artificial; identical to SEQ ID NO: 7812
  oligonucleotide probe

SEQ ID NO: 32912 - DNA, 32 bp, Artificial; identical to SEQ ID NO: 7659
  oligonucleotide probe

SEQ ID NO: 32913 - DNA, 32 bp, Artificial; identical to SEQ ID NO: 7659
  oligonucleotide probe

SEQ ID NO: 32914 - DNA, 32 bp, Artificial; identical to SEQ ID NO: 8442
  oligonucleotide probe

SEQ ID NO: 32915 - DNA, 32 bp, Artificial; identical to SEQ ID NO: 8442
  oligonucleotide probe

SEQ ID NO: 32916 - DNA, 32 bp, Artificial; identical to SEQ ID NO: 5163
  oligonucleotide probe

SEQ ID NO: 32917 - DNA, 32 bp, Artificial; identical to SEQ ID NO: 5163
  oligonucleotide probe

SEQ ID NO: 32918 - DNA, 32 bp, Artificial; identical to SEQ ID NO: 7624
  oligonucleotide probe

SEQ ID NO: 32919 - DNA, 32 bp, Artificial; identical to SEQ ID NO: 7624
  oligonucleotide probe

SEQ ID NO: 32920 - DNA, 32 bp, Artificial; identical to SEQ ID NO: 5610
  oligonucleotide probe

SEQ ID NO: 32921 - DNA, 32 bp, Artificial; identical to SEQ ID NO: 8834
  oligonucleotide probe

SEQ ID NO: 32922 - DNA, 32 bp, Artificial; identical to SEQ ID NO: 10052
  oligonucleotide probe

SEQ ID NO: 32923 - DNA, 32 bp, Artificial; identical to SEQ ID NO: 10053
  oligonucleotide probe

SEQ ID NO: 32924 - DNA, 32 bp, Artificial; identical to SEQ ID NO: 5546
  oligonucleotide probe

SEQ ID NO: 32925 - DNA, 32 bp, Artificial; identical to SEQ ID NO: 5538
  oligonucleotide probe

SEQ ID NO: 32926 - DNA, 32 bp, Artificial; identical to SEQ ID NO: 9021
  oligonucleotide probe

SEQ ID NO: 32927 - DNA, 32 bp, Artificial; identical to SEQ ID NO: 8796
  oligonucleotide probe

SEQ ID NO: 32928 - DNA, 32 bp, Artificial; identical to SEQ ID NO: 8780
  oligonucleotide probe

SEQ ID NO: 32929 - DNA, 32 bp, Artificial; identical to SEQ ID NO: 9038
  oligonucleotide probe

SEQ ID NO: 32930 - DNA, 32 bp, Artificial; identical to SEQ ID NO: 8781
  oligonucleotide probe

SEQ ID NO: 32931 - DNA, 32 bp, Artificial; identical to SEQ ID NO: 9252
  oligonucleotide probe

SEQ ID NO: 32932 - DNA, 32 bp, Artificial; identical to SEQ ID NO: 8835
  oligonucleotide probe

SEQ ID NO: 32933 - DNA, 32 bp, Artificial; identical to SEQ ID NO: 5594
  oligonucleotide probe

SEQ ID NO: 32934 - DNA, 32 bp, Artificial; identical to SEQ ID NO: 10064
  oligonucleotide probe

SEQ ID NO: 32935 - DNA, 32 bp, Artificial; identical to SEQ ID NO: 5564
  oligonucleotide probe

SEQ ID NO: 32936 - DNA, 32 bp, Artificial; identical to SEQ ID NO: 8868
  oligonucleotide probe

SEQ ID NO: 32937 - DNA, 32 bp, Artificial; identical to SEQ ID NO: 9020
  oligonucleotide probe

SEQ ID NO: 32938 - DNA, 32 bp, Artificial; identical to SEQ ID NO: 5584
  oligonucleotide probe

SEQ ID NO: 32939 - DNA, 32 bp, Artificial; identical to SEQ ID NO: 8778
  oligonucleotide probe

SEQ ID NO: 32940 - DNA, 32 bp, Artificial; identical to SEQ ID NO: 9253
  oligonucleotide probe

SEQ ID NO: 32941 - DNA, 32 bp, Artificial; identical to SEQ ID NO: 6145
  oligonucleotide probe

SEQ ID NO: 32942 - DNA, 32 bp, Artificial; identical to SEQ ID NO: 9826
  oligonucleotide probe

SEQ ID NO: 32943 - DNA, 32 bp, Artificial; identical to SEQ ID NO: 13573
  oligonucleotide probe

SEQ ID NO: 32944 - DNA, 32 bp, Artificial; identical to SEQ ID NO: 13573
  oligonucleotide probe

SEQ ID NO: 32945 - DNA, 32 bp, Artificial; identical to SEQ ID NO: 13573
  oligonucleotide probe

SEQ ID NO: 32946 - DNA, 32 bp, Artificial; identical to SEQ ID NO: 13573
  oligonucleotide probe

SEQ ID NO: 32947 - DNA, 32 bp, Artificial; identical to SEQ ID NO: 13573
  oligonucleotide probe

SEQ ID NO: 32948 - DNA, 32 bp, Artificial; identical to SEQ ID NO: 13573
  oligonucleotide probe

SEQ ID NO: 32949 - DNA, 32 bp, Artificial; identical to SEQ ID NO: 13573
  oligonucleotide probe

SEQ ID NO: 32950 - DNA, 32 bp, Artificial; identical to SEQ ID NO: 13573
  oligonucleotide probe

SEQ ID NO: 32951 - DNA, 32 bp, Artificial; identical to SEQ ID NO: 11181
  oligonucleotide probe

SEQ ID NO: 32952 - DNA, 32 bp, Artificial; identical to SEQ ID NO: 11181
  oligonucleotide probe

SEQ ID NO: 32953 - DNA, 32 bp, Artificial; identical to SEQ ID NO: 11181
  oligonucleotide probe

SEQ ID NO: 32954 - DNA, 32 bp, Artificial; identical to SEQ ID NO: 11181
  oligonucleotide probe

SEQ ID NO: 32955 - DNA, 32 bp, Artificial; identical to SEQ ID NO: 11762
  oligonucleotide probe

SEQ ID NO: 32956 - DNA, 32 bp, Artificial; identical to SEQ ID NO: 11762
  oligonucleotide probe

SEQ ID NO: 32957 - DNA, 32 bp, Artificial; identical to SEQ ID NO: 13587
  oligonucleotide probe

SEQ ID NO: 32958 - DNA, 32 bp, Artificial; identical to SEQ ID NO: 13587
  oligonucleotide probe

SEQ ID NO: 32959 - DNA, 32 bp, Artificial; identical to SEQ ID NO: 13573
  oligonucleotide probe

SEQ ID NO: 32960 - DNA, 32 bp, Artificial; identical to SEQ ID NO: 13573
  oligonucleotide probe

SEQ ID NO: 32961 - DNA, 32 bp, Artificial; identical to SEQ ID NO: 13573
  oligonucleotide probe

SEQ ID NO: 32962 - DNA, 32 bp, Artificial; identical to SEQ ID NO: 13573
  oligonucleotide probe

SEQ ID NO: 32963 - DNA, 32 bp, Artificial; identical to SEQ ID NO: 11185
  oligonucleotide probe

SEQ ID NO: 32964 - DNA, 32 bp, Artificial; identical to SEQ ID NO: 11185
  oligonucleotide probe

SEQ ID NO: 32965 - DNA, 32 bp, Artificial; identical to SEQ ID NO: 11177
  oligonucleotide probe

SEQ ID NO: 32966 - DNA, 32 bp, Artificial; identical to SEQ ID NO: 11177
  oligonucleotide probe

SEQ ID NO: 32967 - DNA, 32 bp, Artificial; identical to SEQ ID NO: 11764
  oligonucleotide probe

SEQ ID NO: 32968 - DNA, 32 bp, Artificial; identical to SEQ ID NO: 11764
  oligonucleotide probe

SEQ ID NO: 32969 - DNA, 32 bp, Artificial; identical to SEQ ID NO: 11173
  oligonucleotide probe

SEQ ID NO: 32970 - DNA, 32 bp, Artificial; identical to SEQ ID NO: 11173
  oligonucleotide probe

SEQ ID NO: 32971 - DNA, 32 bp, Artificial; identical to SEQ ID NO: 11177
  oligonucleotide probe

SEQ ID NO: 32972 - DNA, 32 bp, Artificial; identical to SEQ ID NO: 11177
  oligonucleotide probe

SEQ ID NO: 32973 - DNA, 32 bp, Artificial; identical to SEQ ID NO: 13603
  oligonucleotide probe

SEQ ID NO: 32974 - DNA, 32 bp, Artificial; identical to SEQ ID NO: 13603
  oligonucleotide probe

SEQ ID NO: 32975 - DNA, 32 bp, Artificial; identical to SEQ ID NO: 11177
  oligonucleotide probe

SEQ ID NO: 32976 - DNA, 32 bp, Artificial; identical to SEQ ID NO: 11177
  oligonucleotide probe

SEQ ID NO: 32977 - DNA, 32 bp, Artificial; identical to SEQ ID NO: 13587
  oligonucleotide probe

SEQ ID NO: 32978 - DNA, 32 bp, Artificial; identical to SEQ ID NO: 13587
  oligonucleotide probe

SEQ ID NO: 32979 - DNA, 32 bp, Artificial; identical to SEQ ID NO: 11177
  oligonucleotide probe

SEQ ID NO: 32980 - DNA, 32 bp, Artificial; identical to SEQ ID NO: 11177
  oligonucleotide probe

SEQ ID NO: 32981 - DNA, 32 bp, Artificial; identical to SEQ ID NO: 11181
  oligonucleotide probe

SEQ ID NO: 32982 - DNA, 32 bp, Artificial; identical to SEQ ID NO: 11181
  oligonucleotide probe

SEQ ID NO: 32983 - DNA, 32 bp, Artificial; identical to SEQ ID NO: 11756
  oligonucleotide probe

SEQ ID NO: 32984 - DNA, 32 bp, Artificial; identical to SEQ ID NO: 11756
  oligonucleotide probe

SEQ ID NO: 32985 - DNA, 32 bp, Artificial; identical to SEQ ID NO: 11770
  oligonucleotide probe

SEQ ID NO: 32986 - DNA, 32 bp, Artificial; identical to SEQ ID NO: 11770
  oligonucleotide probe

SEQ ID NO: 32987 - DNA, 32 bp, Artificial; identical to SEQ ID NO: 11770
  oligonucleotide probe

SEQ ID NO: 32988 - DNA, 32 bp, Artificial; identical to SEQ ID NO: 11770
  oligonucleotide probe

SEQ ID NO: 32989 - DNA, 32 bp, Artificial; identical to SEQ ID NO: 13619
  oligonucleotide probe

SEQ ID NO: 32990 - DNA, 32 bp, Artificial; identical to SEQ ID NO: 13619
  oligonucleotide probe

SEQ ID NO: 32991 - DNA, 32 bp, Artificial; identical to SEQ ID NO: 13573
  oligonucleotide probe

SEQ ID NO: 32992 - DNA, 32 bp, Artificial; identical to SEQ ID NO: 13573
  oligonucleotide probe

SEQ ID NO: 32993 - DNA, 32 bp, Artificial; identical to SEQ ID NO: 11181
  oligonucleotide probe

SEQ ID NO: 32994 - DNA, 32 bp, Artificial; identical to SEQ ID NO: 11181
  oligonucleotide probe

SEQ ID NO: 32995 - DNA, 32 bp, Artificial; identical to SEQ ID NO: 13603
  oligonucleotide probe

SEQ ID NO: 32996 - DNA, 32 bp, Artificial; identical to SEQ ID NO: 13603
  oligonucleotide probe

SEQ ID NO: 32997 - DNA, 32 bp, Artificial; identical to SEQ ID NO: 13603
  oligonucleotide probe

SEQ ID NO: 32998 - DNA, 32 bp, Artificial; identical to SEQ ID NO: 13603
  oligonucleotide probe

SEQ ID NO: 32999 - DNA, 32 bp, Artificial; identical to SEQ ID NO: 13603
  oligonucleotide probe

SEQ ID NO: 33000 - DNA, 32 bp, Artificial; identical to SEQ ID NO: 13603
  oligonucleotide probe

SEQ ID NO: 33001 - DNA, 32 bp, Artificial; identical to SEQ ID NO: 13603
  oligonucleotide probe

SEQ ID NO: 33002 - DNA, 32 bp, Artificial; identical to SEQ ID NO: 13603
  oligonucleotide probe

SEQ ID NO: 33003 - DNA, 32 bp, Artificial; identical to SEQ ID NO: 13619
  oligonucleotide probe

SEQ ID NO: 33004 - DNA, 32 bp, Artificial; identical to SEQ ID NO: 13619
  oligonucleotide probe

SEQ ID NO: 33005 - DNA, 32 bp, Artificial; identical to SEQ ID NO: 11173
  oligonucleotide probe

SEQ ID NO: 33006 - DNA, 32 bp, Artificial; identical to SEQ ID NO: 11173
  oligonucleotide probe

SEQ ID NO: 33007 - DNA, 32 bp, Artificial; identical to SEQ ID NO: 11163
  oligonucleotide probe

SEQ ID NO: 33008 - DNA, 32 bp, Artificial; identical to SEQ ID NO: 11163
  oligonucleotide probe

SEQ ID NO: 33009 - DNA, 32 bp, Artificial; identical to SEQ ID NO: 11167
  oligonucleotide probe

SEQ ID NO: 33010 - DNA, 32 bp, Artificial; identical to SEQ ID NO: 11167
  oligonucleotide probe

SEQ ID NO: 33011 - DNA, 32 bp, Artificial; identical to SEQ ID NO: 11764
  oligonucleotide probe

SEQ ID NO: 33012 - DNA, 32 bp, Artificial; identical to SEQ ID NO: 11764
  oligonucleotide probe

SEQ ID NO: 33013 - DNA, 32 bp, Artificial; identical to SEQ ID NO: 11185
  oligonucleotide probe

SEQ ID NO: 33014 - DNA, 32 bp, Artificial; identical to SEQ ID NO: 11185
  oligonucleotide probe

SEQ ID NO: 33015 - DNA, 32 bp, Artificial; identical to SEQ ID NO: 13587
  oligonucleotide probe

SEQ ID NO: 33016 - DNA, 32 bp, Artificial; identical to SEQ ID NO: 13587
  oligonucleotide probe

SEQ ID NO: 33017 - DNA, 32 bp, Artificial; identical to SEQ ID NO: 13603
  oligonucleotide probe

SEQ ID NO: 33018 - DNA, 32 bp, Artificial; identical to SEQ ID NO: 13603
  oligonucleotide probe

SEQ ID NO: 33019 - DNA, 32 bp, Artificial; identical to SEQ ID NO: 13587
  oligonucleotide probe

SEQ ID NO: 33020 - DNA, 32 bp, Artificial; identical to SEQ ID NO: 13587
  oligonucleotide probe

SEQ ID NO: 33021 - DNA, 32 bp, Artificial; identical to SEQ ID NO: 11173
  oligonucleotide probe

SEQ ID NO: 33022 - DNA, 32 bp, Artificial; identical to SEQ ID NO: 11173
  oligonucleotide probe

SEQ ID NO: 33023 - DNA, 32 bp, Artificial; identical to SEQ ID NO: 13573
  oligonucleotide probe

SEQ ID NO: 33024 - DNA, 32 bp, Artificial; identical to SEQ ID NO: 13573
  oligonucleotide probe

SEQ ID NO: 33025 - DNA, 32 bp, Artificial; identical to SEQ ID NO: 11171
  oligonucleotide probe

SEQ ID NO: 33026 - DNA, 32 bp, Artificial; identical to SEQ ID NO: 11171
  oligonucleotide probe

SEQ ID NO: 33027 - DNA, 32 bp, Artificial; identical to SEQ ID NO: 13619
  oligonucleotide probe

SEQ ID NO: 33028 - DNA, 32 bp, Artificial; identical to SEQ ID NO: 13619
  oligonucleotide probe

SEQ ID NO: 33029 - DNA, 32 bp, Artificial; identical to SEQ ID NO: 13587
  oligonucleotide probe

SEQ ID NO: 33030 - DNA, 32 bp, Artificial; identical to SEQ ID NO: 13587
  oligonucleotide probe

SEQ ID NO: 33031 - DNA, 32 bp, Artificial; identical to SEQ ID NO: 13603
  oligonucleotide probe

SEQ ID NO: 33032 - DNA, 32 bp, Artificial; identical to SEQ ID NO: 13603
  oligonucleotide probe

SEQ ID NO: 33033 - DNA, 32 bp, Artificial; identical to SEQ ID NO: 11764
  oligonucleotide probe

SEQ ID NO: 33034 - DNA, 32 bp, Artificial; identical to SEQ ID NO: 11764
  oligonucleotide probe

SEQ ID NO: 33035 - DNA, 32 bp, Artificial; identical to SEQ ID NO: 13619
  oligonucleotide probe

SEQ ID NO: 33036 - DNA, 32 bp, Artificial; identical to SEQ ID NO: 13619
  oligonucleotide probe

SEQ ID NO: 33037 - DNA, 32 bp, Artificial; identical to SEQ ID NO: 11181
  oligonucleotide probe

SEQ ID NO: 33038 - DNA, 32 bp, Artificial; identical to SEQ ID NO: 11181
  oligonucleotide probe

SEQ ID NO: 33039 - DNA, 32 bp, Artificial; identical to SEQ ID NO: 11181
  oligonucleotide probe

SEQ ID NO: 33040 - DNA, 32 bp, Artificial; identical to SEQ ID NO: 11181
  oligonucleotide probe

SEQ ID NO: 33041 - DNA, 32 bp, Artificial; identical to SEQ ID NO: 13619
  oligonucleotide probe

SEQ ID NO: 33042 - DNA, 32 bp, Artificial; identical to SEQ ID NO: 13619
  oligonucleotide probe

SEQ ID NO: 33043 - DNA, 32 bp, Artificial; identical to SEQ ID NO: 13619
  oligonucleotide probe

SEQ ID NO: 33044 - DNA, 32 bp, Artificial; identical to SEQ ID NO: 13619
  oligonucleotide probe

SEQ ID NO: 33045 - DNA, 32 bp, Artificial; identical to SEQ ID NO: 11770
  oligonucleotide probe

SEQ ID NO: 33046 - DNA, 32 bp, Artificial; identical to SEQ ID NO: 11770
  oligonucleotide probe

SEQ ID NO: 33047 - DNA, 32 bp, Artificial; identical to SEQ ID NO: 11770
  oligonucleotide probe

SEQ ID NO: 33048 - DNA, 32 bp, Artificial; identical to SEQ ID NO: 11770
  oligonucleotide probe

SEQ ID NO: 33049 - DNA, 32 bp, Artificial; identical to SEQ ID NO: 13587
  oligonucleotide probe

SEQ ID NO: 33050 - DNA, 32 bp, Artificial; identical to SEQ ID NO: 13587
  oligonucleotide probe

SEQ ID NO: 33051 - DNA, 32 bp, Artificial; identical to SEQ ID NO: 13573
  oligonucleotide probe

SEQ ID NO: 33052 - DNA, 32 bp, Artificial; identical to SEQ ID NO: 13573
  oligonucleotide probe

SEQ ID NO: 33053 - DNA, 32 bp, Artificial; identical to SEQ ID NO: 13619
  oligonucleotide probe

SEQ ID NO: 33054 - DNA, 32 bp, Artificial; identical to SEQ ID NO: 13619
  oligonucleotide probe

SEQ ID NO: 33055 - DNA, 32 bp, Artificial; identical to SEQ ID NO: 11762
  oligonucleotide probe

SEQ ID NO: 33056 - DNA, 32 bp, Artificial; identical to SEQ ID NO: 11762
  oligonucleotide probe

SEQ ID NO: 33057 - DNA, 32 bp, Artificial; identical to SEQ ID NO: 13619
  oligonucleotide probe

SEQ ID NO: 33058 - DNA, 32 bp, Artificial; identical to SEQ ID NO: 13619
  oligonucleotide probe

SEQ ID NO: 33059 - DNA, 32 bp, Artificial; identical to SEQ ID NO: 11764
  oligonucleotide probe

SEQ ID NO: 33060 - DNA, 32 bp, Artificial; identical to SEQ ID NO: 11764
  oligonucleotide probe

SEQ ID NO: 33061 - DNA, 32 bp, Artificial; identical to SEQ ID NO: 13603
  oligonucleotide probe

SEQ ID NO: 33062 - DNA, 32 bp, Artificial; identical to SEQ ID NO: 13603
  oligonucleotide probe

SEQ ID NO: 33063 - DNA, 32 bp, Artificial; identical to SEQ ID NO: 11171
  oligonucleotide probe

SEQ ID NO: 33064 - DNA, 32 bp, Artificial; identical to SEQ ID NO: 11171
  oligonucleotide probe

SEQ ID NO: 33065 - DNA, 32 bp, Artificial; identical to SEQ ID NO: 11163
  oligonucleotide probe

SEQ ID NO: 33066 - DNA, 32 bp, Artificial; identical to SEQ ID NO: 11163
  oligonucleotide probe

SEQ ID NO: 33067 - DNA, 32 bp, Artificial; identical to SEQ ID NO: 11756
  oligonucleotide probe

SEQ ID NO: 33068 - DNA, 32 bp, Artificial; identical to SEQ ID NO: 11756
  oligonucleotide probe

SEQ ID NO: 33069 - DNA, 32 bp, Artificial; identical to SEQ ID NO: 13603
  oligonucleotide probe

SEQ ID NO: 33070 - DNA, 32 bp, Artificial; identical to SEQ ID NO: 13603
  oligonucleotide probe

SEQ ID NO: 33071 - DNA, 32 bp, Artificial; identical to SEQ ID NO: 11185
  oligonucleotide probe

SEQ ID NO: 33072 - DNA, 32 bp, Artificial; identical to SEQ ID NO: 11185
  oligonucleotide probe

SEQ ID NO: 33073 - DNA, 32 bp, Artificial; identical to SEQ ID NO: 13603
  oligonucleotide probe

SEQ ID NO: 33074 - DNA, 32 bp, Artificial; identical to SEQ ID NO: 13603
  oligonucleotide probe

SEQ ID NO: 33075 - DNA, 32 bp, Artificial; identical to SEQ ID NO: 11165
  oligonucleotide probe

SEQ ID NO: 33076 - DNA, 32 bp, Artificial; identical to SEQ ID NO: 11165
  oligonucleotide probe

SEQ ID NO: 33077 - DNA, 32 bp, Artificial; identical to SEQ ID NO: 13573
  oligonucleotide probe

SEQ ID NO: 33078 - DNA, 32 bp, Artificial; identical to SEQ ID NO: 13573
  oligonucleotide probe

SEQ ID NO: 33079 - DNA, 32 bp, Artificial; identical to SEQ ID NO: 13573
  oligonucleotide probe

SEQ ID NO: 33080 - DNA, 32 bp, Artificial; identical to SEQ ID NO: 13573
  oligonucleotide probe

SEQ ID NO: 33081 - DNA, 32 bp, Artificial; identical to SEQ ID NO: 11173
  oligonucleotide probe

SEQ ID NO: 33082 - DNA, 32 bp, Artificial; identical to SEQ ID NO: 11173
  oligonucleotide probe

SEQ ID NO: 33083 - DNA, 32 bp, Artificial; identical to SEQ ID NO: 11177
  oligonucleotide probe

SEQ ID NO: 33084 - DNA, 32 bp, Artificial; identical to SEQ ID NO: 11177
  oligonucleotide probe

SEQ ID NO: 33085 - DNA, 32 bp, Artificial; identical to SEQ ID NO: 13573
  oligonucleotide probe

SEQ ID NO: 33086 - DNA, 32 bp, Artificial; identical to SEQ ID NO: 13573
  oligonucleotide probe

SEQ ID NO: 33087 - DNA, 32 bp, Artificial; identical to SEQ ID NO: 13603
  oligonucleotide probe

SEQ ID NO: 33088 - DNA, 32 bp, Artificial; identical to SEQ ID NO: 13603
  oligonucleotide probe

SEQ ID NO: 33089 - DNA, 32 bp, Artificial; identical to SEQ ID NO: 13587
  oligonucleotide probe

SEQ ID NO: 33090 - DNA, 32 bp, Artificial; identical to SEQ ID NO: 13587
  oligonucleotide probe

SEQ ID NO: 33091 - DNA, 32 bp, Artificial; identical to SEQ ID NO: 11756
  oligonucleotide probe

SEQ ID NO: 33092 - DNA, 32 bp, Artificial; identical to SEQ ID NO: 11756
  oligonucleotide probe

SEQ ID NO: 33093 - DNA, 32 bp, Artificial; identical to SEQ ID NO: 13619
  oligonucleotide probe

SEQ ID NO: 33094 - DNA, 32 bp, Artificial; identical to SEQ ID NO: 13619
  oligonucleotide probe

SEQ ID NO: 33095 - DNA, 32 bp, Artificial; identical to SEQ ID NO: 11770
  oligonucleotide probe

SEQ ID NO: 33096 - DNA, 32 bp, Artificial; identical to SEQ ID NO: 11770
  oligonucleotide probe

SEQ ID NO: 33097 - DNA, 32 bp, Artificial; identical to SEQ ID NO: 13619
  oligonucleotide probe

SEQ ID NO: 33098 - DNA, 32 bp, Artificial; identical to SEQ ID NO: 13619
  oligonucleotide probe

SEQ ID NO: 33099 - DNA, 32 bp, Artificial; identical to SEQ ID NO: 11764
  oligonucleotide probe

SEQ ID NO: 33100 - DNA, 32 bp, Artificial; identical to SEQ ID NO: 11764
  oligonucleotide probe

SEQ ID NO: 33101 - DNA, 32 bp, Artificial; identical to SEQ ID NO: 13587
  oligonucleotide probe

SEQ ID NO: 33102 - DNA, 32 bp, Artificial; identical to SEQ ID NO: 13587
  oligonucleotide probe

SEQ ID NO: 33103 - DNA, 32 bp, Artificial; identical to SEQ ID NO: 11167
  oligonucleotide probe

SEQ ID NO: 33104 - DNA, 32 bp, Artificial; identical to SEQ ID NO: 11167
  oligonucleotide probe

SEQ ID NO: 33105 - DNA, 32 bp, Artificial; identical to SEQ ID NO: 11181
  oligonucleotide probe

SEQ ID NO: 33106 - DNA, 32 bp, Artificial; identical to SEQ ID NO: 11181
  oligonucleotide probe

SEQ ID NO: 33107 - DNA, 32 bp, Artificial; identical to SEQ ID NO: 13603
  oligonucleotide probe

SEQ ID NO: 33108 - DNA, 32 bp, Artificial; identical to SEQ ID NO: 13603
  oligonucleotide probe

SEQ ID NO: 33109 - DNA, 32 bp, Artificial; identical to SEQ ID NO: 11770
  oligonucleotide probe

SEQ ID NO: 33110 - DNA, 32 bp, Artificial; identical to SEQ ID NO: 11770
  oligonucleotide probe

SEQ ID NO: 33111 - DNA, 32 bp, Artificial; identical to SEQ ID NO: 13587
  oligonucleotide probe

SEQ ID NO: 33112 - DNA, 32 bp, Artificial; identical to SEQ ID NO: 13587
  oligonucleotide probe

SEQ ID NO: 33113 - DNA, 32 bp, Artificial; identical to SEQ ID NO: 11756
  oligonucleotide probe

SEQ ID NO: 33114 - DNA, 32 bp, Artificial; identical to SEQ ID NO: 11756
  oligonucleotide probe

SEQ ID NO: 33115 - DNA, 32 bp, Artificial; identical to SEQ ID NO: 11165
  oligonucleotide probe

SEQ ID NO: 33116 - DNA, 32 bp, Artificial; identical to SEQ ID NO: 11165
  oligonucleotide probe

SEQ ID NO: 33117 - DNA, 32 bp, Artificial; identical to SEQ ID NO: 11171
  oligonucleotide probe

SEQ ID NO: 33118 - DNA, 32 bp, Artificial; identical to SEQ ID NO: 11171
  oligonucleotide probe

SEQ ID NO: 33119 - DNA, 32 bp, Artificial; identical to SEQ ID NO: 13619
  oligonucleotide probe

SEQ ID NO: 33120 - DNA, 32 bp, Artificial; identical to SEQ ID NO: 13619
  oligonucleotide probe

SEQ ID NO: 33121 - DNA, 32 bp, Artificial; identical to SEQ ID NO: 11756
  oligonucleotide probe

SEQ ID NO: 33122 - DNA, 32 bp, Artificial; identical to SEQ ID NO: 11756
  oligonucleotide probe

SEQ ID NO: 33123 - DNA, 32 bp, Artificial; identical to SEQ ID NO: 13603
  oligonucleotide probe

SEQ ID NO: 33124 - DNA, 32 bp, Artificial; identical to SEQ ID NO: 13603
  oligonucleotide probe

SEQ ID NO: 33125 - DNA, 32 bp, Artificial; identical to SEQ ID NO: 11167
  oligonucleotide probe

SEQ ID NO: 33126 - DNA, 32 bp, Artificial; identical to SEQ ID NO: 11167
  oligonucleotide probe

SEQ ID NO: 33127 - DNA, 32 bp, Artificial; identical to SEQ ID NO: 11764
  oligonucleotide probe

SEQ ID NO: 33128 - DNA, 32 bp, Artificial; identical to SEQ ID NO: 11764
  oligonucleotide probe

SEQ ID NO: 33129 - DNA, 32 bp, Artificial; identical to SEQ ID NO: 13587
  oligonucleotide probe

SEQ ID NO: 33130 - DNA, 32 bp, Artificial; identical to SEQ ID NO: 13587
  oligonucleotide probe

SEQ ID NO: 33131 - DNA, 32 bp, Artificial; identical to SEQ ID NO: 13573
  oligonucleotide probe

SEQ ID NO: 33132 - DNA, 32 bp, Artificial; identical to SEQ ID NO: 13573
  oligonucleotide probe

SEQ ID NO: 33133 - DNA, 32 bp, Artificial; identical to SEQ ID NO: 13573
  oligonucleotide probe

SEQ ID NO: 33134 - DNA, 32 bp, Artificial; identical to SEQ ID NO: 13573
  oligonucleotide probe

SEQ ID NO: 33135 - DNA, 32 bp, Artificial; identical to SEQ ID NO: 13573
  oligonucleotide probe

SEQ ID NO: 33136 - DNA, 32 bp, Artificial; identical to SEQ ID NO: 13573
  oligonucleotide probe

SEQ ID NO: 33137 - DNA, 32 bp, Artificial; identical to SEQ ID NO: 11173
  oligonucleotide probe

SEQ ID NO: 33138 - DNA, 32 bp, Artificial; identical to SEQ ID NO: 11173
  oligonucleotide probe

SEQ ID NO: 33139 - DNA, 32 bp, Artificial; identical to SEQ ID NO: 13603
  oligonucleotide probe

SEQ ID NO: 33140 - DNA, 32 bp, Artificial; identical to SEQ ID NO: 13603
  oligonucleotide probe

SEQ ID NO: 33141 - DNA, 32 bp, Artificial; identical to SEQ ID NO: 11185
  oligonucleotide probe

SEQ ID NO: 33142 - DNA, 32 bp, Artificial; identical to SEQ ID NO: 11185
  oligonucleotide probe

SEQ ID NO: 33143 - DNA, 32 bp, Artificial; identical to SEQ ID NO: 11764
  oligonucleotide probe

SEQ ID NO: 33144 - DNA, 32 bp, Artificial; identical to SEQ ID NO: 11764
  oligonucleotide probe

SEQ ID NO: 33145 - DNA, 32 bp, Artificial; identical to SEQ ID NO: 13573
  oligonucleotide probe

SEQ ID NO: 33146 - DNA, 32 bp, Artificial; identical to SEQ ID NO: 13573
  oligonucleotide probe

SEQ ID NO: 33147 - DNA, 32 bp, Artificial; identical to SEQ ID NO: 11185
  oligonucleotide probe

SEQ ID NO: 33148 - DNA, 32 bp, Artificial; identical to SEQ ID NO: 11185
  oligonucleotide probe

SEQ ID NO: 33149 - DNA, 32 bp, Artificial; identical to SEQ ID NO: 11762
  oligonucleotide probe

SEQ ID NO: 33150 - DNA, 32 bp, Artificial; identical to SEQ ID NO: 11762
  oligonucleotide probe

SEQ ID NO: 33151 - DNA, 32 bp, Artificial; identical to SEQ ID NO: 11756
  oligonucleotide probe

SEQ ID NO: 33152 - DNA, 32 bp, Artificial; identical to SEQ ID NO: 11756
  oligonucleotide probe

SEQ ID NO: 33153 - DNA, 32 bp, Artificial; identical to SEQ ID NO: 13587
  oligonucleotide probe

SEQ ID NO: 33154 - DNA, 32 bp, Artificial; identical to SEQ ID NO: 13587
  oligonucleotide probe

SEQ ID NO: 33155 - DNA, 32 bp, Artificial; identical to SEQ ID NO: 11165
  oligonucleotide probe

SEQ ID NO: 33156 - DNA, 32 bp, Artificial; identical to SEQ ID NO: 11165
  oligonucleotide probe

SEQ ID NO: 33157 - DNA, 32 bp, Artificial; identical to SEQ ID NO: 13587
  oligonucleotide probe

SEQ ID NO: 33158 - DNA, 32 bp, Artificial; identical to SEQ ID NO: 13587
  oligonucleotide probe

SEQ ID NO: 33159 - DNA, 32 bp, Artificial; identical to SEQ ID NO: 11762
  oligonucleotide probe

SEQ ID NO: 33160 - DNA, 32 bp, Artificial; identical to SEQ ID NO: 11762
  oligonucleotide probe

SEQ ID NO: 33161 - DNA, 32 bp, Artificial; identical to SEQ ID NO: 13573
  oligonucleotide probe

SEQ ID NO: 33162 - DNA, 32 bp, Artificial; identical to SEQ ID NO: 13573
  oligonucleotide probe

SEQ ID NO: 33163 - DNA, 32 bp, Artificial; identical to SEQ ID NO: 13603
  oligonucleotide probe

SEQ ID NO: 33164 - DNA, 32 bp, Artificial; identical to SEQ ID NO: 13603
  oligonucleotide probe

SEQ ID NO: 33165 - DNA, 32 bp, Artificial; identical to SEQ ID NO: 11181
  oligonucleotide probe

SEQ ID NO: 33166 - DNA, 32 bp, Artificial; identical to SEQ ID NO: 11181
  oligonucleotide probe

SEQ ID NO: 33167 - DNA, 32 bp, Artificial; identical to SEQ ID NO: 11165
  oligonucleotide probe

SEQ ID NO: 33168 - DNA, 32 bp, Artificial; identical to SEQ ID NO: 11165
  oligonucleotide probe

SEQ ID NO: 33169 - DNA, 32 bp, Artificial; identical to SEQ ID NO: 13619
  oligonucleotide probe

SEQ ID NO: 33170 - DNA, 32 bp, Artificial; identical to SEQ ID NO: 13619
  oligonucleotide probe

SEQ ID NO: 33171 - DNA, 32 bp, Artificial; identical to SEQ ID NO: 11177
  oligonucleotide probe

SEQ ID NO: 33172 - DNA, 32 bp, Artificial; identical to SEQ ID NO: 11177
  oligonucleotide probe

SEQ ID NO: 33173 - DNA, 32 bp, Artificial; identical to SEQ ID NO: 11770
  oligonucleotide probe

SEQ ID NO: 33174 - DNA, 32 bp, Artificial; identical to SEQ ID NO: 11770
  oligonucleotide probe

SEQ ID NO: 33175 - DNA, 32 bp, Artificial; identical to SEQ ID NO: 11171
  oligonucleotide probe

SEQ ID NO: 33176 - DNA, 32 bp, Artificial; identical to SEQ ID NO: 11171
  oligonucleotide probe

SEQ ID NO: 33177 - DNA, 32 bp, Artificial; identical to SEQ ID NO: 13619
  oligonucleotide probe

SEQ ID NO: 33178 - DNA, 32 bp, Artificial; identical to SEQ ID NO: 13619
  oligonucleotide probe

SEQ ID NO: 33179 - DNA, 32 bp, Artificial; identical to SEQ ID NO: 11177
  oligonucleotide probe

SEQ ID NO: 33180 - DNA, 32 bp, Artificial; identical to SEQ ID NO: 11177
  oligonucleotide probe

SEQ ID NO: 33181 - DNA, 32 bp, Artificial; identical to SEQ ID NO: 11165
  oligonucleotide probe

SEQ ID NO: 33182 - DNA, 32 bp, Artificial; identical to SEQ ID NO: 11165
  oligonucleotide probe

SEQ ID NO: 33183 - DNA, 32 bp, Artificial; identical to SEQ ID NO: 11173
  oligonucleotide probe

SEQ ID NO: 33184 - DNA, 32 bp, Artificial; identical to SEQ ID NO: 11173
  oligonucleotide probe

SEQ ID NO: 33185 - DNA, 32 bp, Artificial; identical to SEQ ID NO: 11764
  oligonucleotide probe

SEQ ID NO: 33186 - DNA, 32 bp, Artificial; identical to SEQ ID NO: 11764
  oligonucleotide probe

SEQ ID NO: 33187 - DNA, 32 bp, Artificial; identical to SEQ ID NO: 11756
  oligonucleotide probe

SEQ ID NO: 33188 - DNA, 32 bp, Artificial; identical to SEQ ID NO: 11756
  oligonucleotide probe

SEQ ID NO: 33189 - DNA, 32 bp, Artificial; identical to SEQ ID NO: 11756
  oligonucleotide probe

SEQ ID NO: 33190 - DNA, 32 bp, Artificial; identical to SEQ ID NO: 11756
  oligonucleotide probe

SEQ ID NO: 33191 - DNA, 32 bp, Artificial; identical to SEQ ID NO: 13587
  oligonucleotide probe

SEQ ID NO: 33192 - DNA, 32 bp, Artificial; identical to SEQ ID NO: 13587
  oligonucleotide probe

SEQ ID NO: 33193 - DNA, 32 bp, Artificial; identical to SEQ ID NO: 11762
  oligonucleotide probe

SEQ ID NO: 33194 - DNA, 32 bp, Artificial; identical to SEQ ID NO: 11762
  oligonucleotide probe

SEQ ID NO: 33195 - DNA, 32 bp, Artificial; identical to SEQ ID NO: 11764
  oligonucleotide probe

SEQ ID NO: 33196 - DNA, 32 bp, Artificial; identical to SEQ ID NO: 11764
  oligonucleotide probe

SEQ ID NO: 33197 - DNA, 32 bp, Artificial; identical to SEQ ID NO: 11185
  oligonucleotide probe

SEQ ID NO: 33198 - DNA, 32 bp, Artificial; identical to SEQ ID NO: 11185
  oligonucleotide probe

SEQ ID NO: 33199 - DNA, 32 bp, Artificial; identical to SEQ ID NO: 13619
  oligonucleotide probe

SEQ ID NO: 33200 - DNA, 32 bp, Artificial; identical to SEQ ID NO: 13619
  oligonucleotide probe

SEQ ID NO: 33201 - DNA, 32 bp, Artificial; identical to SEQ ID NO: 11762
  oligonucleotide probe

SEQ ID NO: 33202 - DNA, 32 bp, Artificial; identical to SEQ ID NO: 11762
  oligonucleotide probe

SEQ ID NO: 33203 - DNA, 32 bp, Artificial; identical to SEQ ID NO: 11165
  oligonucleotide probe

SEQ ID NO: 33204 - DNA, 32 bp, Artificial; identical to SEQ ID NO: 11165
  oligonucleotide probe

SEQ ID NO: 33205 - DNA, 32 bp, Artificial; identical to SEQ ID NO: 11762
  oligonucleotide probe

SEQ ID NO: 33206 - DNA, 32 bp, Artificial; identical to SEQ ID NO: 11762
  oligonucleotide probe

SEQ ID NO: 33207 - DNA, 32 bp, Artificial; identical to SEQ ID NO: 11185
  oligonucleotide probe

SEQ ID NO: 33208 - DNA, 32 bp, Artificial; identical to SEQ ID NO: 11185
  oligonucleotide probe

SEQ ID NO: 33209 - DNA, 32 bp, Artificial; identical to SEQ ID NO: 13619
  oligonucleotide probe

SEQ ID NO: 33210 - DNA, 32 bp, Artificial; identical to SEQ ID NO: 13619
  oligonucleotide probe

SEQ ID NO: 33211 - DNA, 32 bp, Artificial; identical to SEQ ID NO: 11165
  oligonucleotide probe

SEQ ID NO: 33212 - DNA, 32 bp, Artificial; identical to SEQ ID NO: 11165
  oligonucleotide probe

SEQ ID NO: 33213 - DNA, 32 bp, Artificial; identical to SEQ ID NO: 11173
  oligonucleotide probe

SEQ ID NO: 33214 - DNA, 32 bp, Artificial; identical to SEQ ID NO: 11173
  oligonucleotide probe

SEQ ID NO: 33215 - DNA, 32 bp, Artificial; identical to SEQ ID NO: 11770
  oligonucleotide probe

SEQ ID NO: 33216 - DNA, 32 bp, Artificial; identical to SEQ ID NO: 11770
  oligonucleotide probe

SEQ ID NO: 33217 - DNA, 32 bp, Artificial; identical to SEQ ID NO: 11185
  oligonucleotide probe

SEQ ID NO: 33218 - DNA, 32 bp, Artificial; identical to SEQ ID NO: 11185
  oligonucleotide probe

SEQ ID NO: 33219 - DNA, 32 bp, Artificial; identical to SEQ ID NO: 11165
  oligonucleotide probe

SEQ ID NO: 33220 - DNA, 32 bp, Artificial; identical to SEQ ID NO: 11165
  oligonucleotide probe

SEQ ID NO: 33221 - DNA, 32 bp, Artificial; identical to SEQ ID NO: 11756
  oligonucleotide probe

SEQ ID NO: 33222 - DNA, 32 bp, Artificial; identical to SEQ ID NO: 11756
  oligonucleotide probe

SEQ ID NO: 33223 - DNA, 32 bp, Artificial; identical to SEQ ID NO: 13619
  oligonucleotide probe

SEQ ID NO: 33224 - DNA, 32 bp, Artificial; identical to SEQ ID NO: 13619
  oligonucleotide probe

SEQ ID NO: 33225 - DNA, 32 bp, Artificial; identical to SEQ ID NO: 11762
  oligonucleotide probe

SEQ ID NO: 33226 - DNA, 32 bp, Artificial; identical to SEQ ID NO: 11762
  oligonucleotide probe

SEQ ID NO: 33227 - DNA, 32 bp, Artificial; identical to SEQ ID NO: 11167
  oligonucleotide probe

SEQ ID NO: 33228 - DNA, 32 bp, Artificial; identical to SEQ ID NO: 11167
  oligonucleotide probe

SEQ ID NO: 33229 - DNA, 32 bp, Artificial; identical to SEQ ID NO: 13619
  oligonucleotide probe

SEQ ID NO: 33230 - DNA, 32 bp, Artificial; identical to SEQ ID NO: 13619
  oligonucleotide probe

SEQ ID NO: 33231 - DNA, 32 bp, Artificial; identical to SEQ ID NO: 13619
  oligonucleotide probe

SEQ ID NO: 33232 - DNA, 32 bp, Artificial; identical to SEQ ID NO: 13619
  oligonucleotide probe

SEQ ID NO: 33233 - DNA, 32 bp, Artificial; identical to SEQ ID NO: 13619
  oligonucleotide probe

SEQ ID NO: 33234 - DNA, 32 bp, Artificial; identical to SEQ ID NO: 13619
  oligonucleotide probe

SEQ ID NO: 33235 - DNA, 32 bp, Artificial; identical to SEQ ID NO: 11764
  oligonucleotide probe

SEQ ID NO: 33236 - DNA, 32 bp, Artificial; identical to SEQ ID NO: 11764
  oligonucleotide probe

SEQ ID NO: 33237 - DNA, 32 bp, Artificial; identical to SEQ ID NO: 11165
  oligonucleotide probe

SEQ ID NO: 33238 - DNA, 32 bp, Artificial; identical to SEQ ID NO: 11165
  oligonucleotide probe

SEQ ID NO: 33239 - DNA, 32 bp, Artificial; identical to SEQ ID NO: 11165
  oligonucleotide probe

SEQ ID NO: 33240 - DNA, 32 bp, Artificial; identical to SEQ ID NO: 11165
  oligonucleotide probe

SEQ ID NO: 33241 - DNA, 32 bp, Artificial; identical to SEQ ID NO: 11764
  oligonucleotide probe

SEQ ID NO: 33242 - DNA, 32 bp, Artificial; identical to SEQ ID NO: 11764
  oligonucleotide probe

SEQ ID NO: 33243 - DNA, 32 bp, Artificial; identical to SEQ ID NO: 11756
  oligonucleotide probe

SEQ ID NO: 33244 - DNA, 32 bp, Artificial; identical to SEQ ID NO: 11756
  oligonucleotide probe

SEQ ID NO: 33245 - DNA, 32 bp, Artificial; identical to SEQ ID NO: 11163
  oligonucleotide probe

SEQ ID NO: 33246 - DNA, 32 bp, Artificial; identical to SEQ ID NO: 11163
  oligonucleotide probe

SEQ ID NO: 33247 - DNA, 32 bp, Artificial; identical to SEQ ID NO: 13573
  oligonucleotide probe

SEQ ID NO: 33248 - DNA, 32 bp, Artificial; identical to SEQ ID NO: 13573
  oligonucleotide probe

SEQ ID NO: 33249 - DNA, 32 bp, Artificial; identical to SEQ ID NO: 11185
  oligonucleotide probe

SEQ ID NO: 33250 - DNA, 32 bp, Artificial; identical to SEQ ID NO: 11185
  oligonucleotide probe

SEQ ID NO: 33251 - DNA, 32 bp, Artificial; identical to SEQ ID NO: 13587
  oligonucleotide probe

SEQ ID NO: 33252 - DNA, 32 bp, Artificial; identical to SEQ ID NO: 13587
  oligonucleotide probe

SEQ ID NO: 33253 - DNA, 32 bp, Artificial; identical to SEQ ID NO: 11764
  oligonucleotide probe

SEQ ID NO: 33254 - DNA, 32 bp, Artificial; identical to SEQ ID NO: 11764
  oligonucleotide probe

SEQ ID NO: 33255 - DNA, 32 bp, Artificial; identical to SEQ ID NO: 13573
  oligonucleotide probe

SEQ ID NO: 33256 - DNA, 32 bp, Artificial; identical to SEQ ID NO: 13573
  oligonucleotide probe

SEQ ID NO: 33257 - DNA, 32 bp, Artificial; identical to SEQ ID NO: 13587
  oligonucleotide probe

SEQ ID NO: 33258 - DNA, 32 bp, Artificial; identical to SEQ ID NO: 13587
  oligonucleotide probe

SEQ ID NO: 33259 - DNA, 32 bp, Artificial; identical to SEQ ID NO: 11167
  oligonucleotide probe

SEQ ID NO: 33260 - DNA, 32 bp, Artificial; identical to SEQ ID NO: 11167
  oligonucleotide probe

SEQ ID NO: 33261 - DNA, 32 bp, Artificial; identical to SEQ ID NO: 13603
  oligonucleotide probe

SEQ ID NO: 33262 - DNA, 32 bp, Artificial; identical to SEQ ID NO: 13603
  oligonucleotide probe

SEQ ID NO: 33263 - DNA, 32 bp, Artificial; identical to SEQ ID NO: 13573
  oligonucleotide probe

SEQ ID NO: 33264 - DNA, 32 bp, Artificial; identical to SEQ ID NO: 13573
  oligonucleotide probe

SEQ ID NO: 33265 - DNA, 32 bp, Artificial; identical to SEQ ID NO: 11185
  oligonucleotide probe

SEQ ID NO: 33266 - DNA, 32 bp, Artificial; identical to SEQ ID NO: 11185
  oligonucleotide probe

SEQ ID NO: 33267 - DNA, 32 bp, Artificial; identical to SEQ ID NO: 11762
  oligonucleotide probe

SEQ ID NO: 33268 - DNA, 32 bp, Artificial; identical to SEQ ID NO: 11762
  oligonucleotide probe

SEQ ID NO: 33269 - DNA, 32 bp, Artificial; identical to SEQ ID NO: 11764
  oligonucleotide probe

SEQ ID NO: 33270 - DNA, 32 bp, Artificial; identical to SEQ ID NO: 11764
  oligonucleotide probe

SEQ ID NO: 33271 - DNA, 32 bp, Artificial; identical to SEQ ID NO: 11173
  oligonucleotide probe

SEQ ID NO: 33272 - DNA, 32 bp, Artificial; identical to SEQ ID NO: 11173
  oligonucleotide probe

SEQ ID NO: 33273 - DNA, 32 bp, Artificial; identical to SEQ ID NO: 13573
  oligonucleotide probe

SEQ ID NO: 33274 - DNA, 32 bp, Artificial; identical to SEQ ID NO: 13573
  oligonucleotide probe

SEQ ID NO: 33275 - DNA, 32 bp, Artificial; identical to SEQ ID NO: 11764
  oligonucleotide probe

SEQ ID NO: 33276 - DNA, 32 bp, Artificial; identical to SEQ ID NO: 11764
  oligonucleotide probe

SEQ ID NO: 33277 - DNA, 32 bp, Artificial; identical to SEQ ID NO: 11173
  oligonucleotide probe

SEQ ID NO: 33278 - DNA, 32 bp, Artificial; identical to SEQ ID NO: 11173
  oligonucleotide probe

SEQ ID NO: 33279 - DNA, 32 bp, Artificial; identical to SEQ ID NO: 13603
  oligonucleotide probe

SEQ ID NO: 33280 - DNA, 32 bp, Artificial; identical to SEQ ID NO: 13603
  oligonucleotide probe

SEQ ID NO: 33281 - DNA, 32 bp, Artificial; identical to SEQ ID NO: 13603
  oligonucleotide probe

SEQ ID NO: 33282 - DNA, 32 bp, Artificial; identical to SEQ ID NO: 13603
  oligonucleotide probe

SEQ ID NO: 33283 - DNA, 32 bp, Artificial; identical to SEQ ID NO: 11762
  oligonucleotide probe

SEQ ID NO: 33284 - DNA, 32 bp, Artificial; identical to SEQ ID NO: 11762
  oligonucleotide probe

SEQ ID NO: 33285 - DNA, 32 bp, Artificial; identical to SEQ ID NO: 11756
  oligonucleotide probe

SEQ ID NO: 33286 - DNA, 32 bp, Artificial; identical to SEQ ID NO: 11756
  oligonucleotide probe

SEQ ID NO: 33287 - DNA, 32 bp, Artificial; identical to SEQ ID NO: 11167
  oligonucleotide probe

SEQ ID NO: 33288 - DNA, 32 bp, Artificial; identical to SEQ ID NO: 11167
  oligonucleotide probe

SEQ ID NO: 33289 - DNA, 32 bp, Artificial; identical to SEQ ID NO: 11171
  oligonucleotide probe

SEQ ID NO: 33290 - DNA, 32 bp, Artificial; identical to SEQ ID NO: 11171
  oligonucleotide probe

SEQ ID NO: 33291 - DNA, 32 bp, Artificial; identical to SEQ ID NO: 11165
  oligonucleotide probe

SEQ ID NO: 33292 - DNA, 32 bp, Artificial; identical to SEQ ID NO: 11165
  oligonucleotide probe

SEQ ID NO: 33293 - DNA, 32 bp, Artificial; identical to SEQ ID NO: 11167
  oligonucleotide probe

SEQ ID NO: 33294 - DNA, 32 bp, Artificial; identical to SEQ ID NO: 11167
  oligonucleotide probe

SEQ ID NO: 33295 - DNA, 32 bp, Artificial; identical to SEQ ID NO: 13587
  oligonucleotide probe

SEQ ID NO: 33296 - DNA, 32 bp, Artificial; identical to SEQ ID NO: 13587
  oligonucleotide probe

SEQ ID NO: 33297 - DNA, 32 bp, Artificial; identical to SEQ ID NO: 11185
  oligonucleotide probe

SEQ ID NO: 33298 - DNA, 32 bp, Artificial; identical to SEQ ID NO: 11185
  oligonucleotide probe

SEQ ID NO: 33299 - DNA, 32 bp, Artificial; identical to SEQ ID NO: 11756
  oligonucleotide probe

SEQ ID NO: 33300 - DNA, 32 bp, Artificial; identical to SEQ ID NO: 11756
  oligonucleotide probe

SEQ ID NO: 33301 - DNA, 32 bp, Artificial; identical to SEQ ID NO: 11764
  oligonucleotide probe

SEQ ID NO: 33302 - DNA, 32 bp, Artificial; identical to SEQ ID NO: 11764
  oligonucleotide probe

SEQ ID NO: 33303 - DNA, 32 bp, Artificial; identical to SEQ ID NO: 11167
  oligonucleotide probe

SEQ ID NO: 33304 - DNA, 32 bp, Artificial; identical to SEQ ID NO: 11167
  oligonucleotide probe

SEQ ID NO: 33305 - DNA, 32 bp, Artificial; identical to SEQ ID NO: 13587
  oligonucleotide probe

SEQ ID NO: 33306 - DNA, 32 bp, Artificial; identical to SEQ ID NO: 13587
  oligonucleotide probe

SEQ ID NO: 33307 - DNA, 32 bp, Artificial; identical to SEQ ID NO: 11770
  oligonucleotide probe

SEQ ID NO: 33308 - DNA, 32 bp, Artificial; identical to SEQ ID NO: 11770
  oligonucleotide probe

SEQ ID NO: 33309 - DNA, 32 bp, Artificial; identical to SEQ ID NO: 11764
  oligonucleotide probe

SEQ ID NO: 33310 - DNA, 32 bp, Artificial; identical to SEQ ID NO: 11764
  oligonucleotide probe

SEQ ID NO: 33311 - DNA, 32 bp, Artificial; identical to SEQ ID NO: 13619
  oligonucleotide probe

SEQ ID NO: 33312 - DNA, 32 bp, Artificial; identical to SEQ ID NO: 13619
  oligonucleotide probe

SEQ ID NO: 33313 - DNA, 32 bp, Artificial; identical to SEQ ID NO: 11171
  oligonucleotide probe

SEQ ID NO: 33314 - DNA, 32 bp, Artificial; identical to SEQ ID NO: 11171
  oligonucleotide probe

SEQ ID NO: 33315 - DNA, 32 bp, Artificial; identical to SEQ ID NO: 13619
  oligonucleotide probe

SEQ ID NO: 33316 - DNA, 32 bp, Artificial; identical to SEQ ID NO: 13619
  oligonucleotide probe

SEQ ID NO: 33317 - DNA, 32 bp, Artificial; identical to SEQ ID NO: 13603
  oligonucleotide probe

SEQ ID NO: 33318 - DNA, 32 bp, Artificial; identical to SEQ ID NO: 13603
  oligonucleotide probe

SEQ ID NO: 33319 - DNA, 32 bp, Artificial; identical to SEQ ID NO: 11770
  oligonucleotide probe

SEQ ID NO: 33320 - DNA, 32 bp, Artificial; identical to SEQ ID NO: 11770
  oligonucleotide probe

SEQ ID NO: 33321 - DNA, 32 bp, Artificial; identical to SEQ ID NO: 11756
  oligonucleotide probe

SEQ ID NO: 33322 - DNA, 32 bp, Artificial; identical to SEQ ID NO: 11756
  oligonucleotide probe

SEQ ID NO: 33323 - DNA, 32 bp, Artificial; identical to SEQ ID NO: 11181
  oligonucleotide probe

SEQ ID NO: 33324 - DNA, 32 bp, Artificial; identical to SEQ ID NO: 11181
  oligonucleotide probe

SEQ ID NO: 33325 - DNA, 32 bp, Artificial; identical to SEQ ID NO: 13603
  oligonucleotide probe

SEQ ID NO: 33326 - DNA, 32 bp, Artificial; identical to SEQ ID NO: 13603
  oligonucleotide probe

SEQ ID NO: 33327 - DNA, 32 bp, Artificial; identical to SEQ ID NO: 11185
  oligonucleotide probe

SEQ ID NO: 33328 - DNA, 32 bp, Artificial; identical to SEQ ID NO: 11185
  oligonucleotide probe

SEQ ID NO: 33329 - DNA, 32 bp, Artificial; identical to SEQ ID NO: 11173
  oligonucleotide probe

SEQ ID NO: 33330 - DNA, 32 bp, Artificial; identical to SEQ ID NO: 11173
  oligonucleotide probe

SEQ ID NO: 33331 - DNA, 32 bp, Artificial; identical to SEQ ID NO: 13587
  oligonucleotide probe

SEQ ID NO: 33332 - DNA, 32 bp, Artificial; identical to SEQ ID NO: 13587
  oligonucleotide probe

SEQ ID NO: 33333 - DNA, 32 bp, Artificial; identical to SEQ ID NO: 11770
  oligonucleotide probe

SEQ ID NO: 33334 - DNA, 32 bp, Artificial; identical to SEQ ID NO: 11770
  oligonucleotide probe

SEQ ID NO: 33335 - DNA, 32 bp, Artificial; identical to SEQ ID NO: 11165
  oligonucleotide probe

SEQ ID NO: 33336 - DNA, 32 bp, Artificial; identical to SEQ ID NO: 11165
  oligonucleotide probe

SEQ ID NO: 33337 - DNA, 32 bp, Artificial; identical to SEQ ID NO: 11177
  oligonucleotide probe

SEQ ID NO: 33338 - DNA, 32 bp, Artificial; identical to SEQ ID NO: 11177
  oligonucleotide probe

SEQ ID NO: 33339 - DNA, 32 bp, Artificial; identical to SEQ ID NO: 13619
  oligonucleotide probe

SEQ ID NO: 33340 - DNA, 32 bp, Artificial; identical to SEQ ID NO: 13619
  oligonucleotide probe

SEQ ID NO: 33341 - DNA, 32 bp, Artificial; identical to SEQ ID NO: 13573
  oligonucleotide probe

SEQ ID NO: 33342 - DNA, 32 bp, Artificial; identical to SEQ ID NO: 13573
  oligonucleotide probe

SEQ ID NO: 33343 - DNA, 32 bp, Artificial; identical to SEQ ID NO: 13603
  oligonucleotide probe

SEQ ID NO: 33344 - DNA, 32 bp, Artificial; identical to SEQ ID NO: 13603
  oligonucleotide probe

SEQ ID NO: 33345 - DNA, 32 bp, Artificial; identical to SEQ ID NO: 11173
  oligonucleotide probe

SEQ ID NO: 33346 - DNA, 32 bp, Artificial; identical to SEQ ID NO: 11173
  oligonucleotide probe

SEQ ID NO: 33347 - DNA, 32 bp, Artificial; identical to SEQ ID NO: 11185
  oligonucleotide probe

SEQ ID NO: 33348 - DNA, 32 bp, Artificial; identical to SEQ ID NO: 11185
  oligonucleotide probe

SEQ ID NO: 33349 - DNA, 32 bp, Artificial; identical to SEQ ID NO: 11764
  oligonucleotide probe

SEQ ID NO: 33350 - DNA, 32 bp, Artificial; identical to SEQ ID NO: 11764
  oligonucleotide probe

SEQ ID NO: 33351 - DNA, 32 bp, Artificial; identical to SEQ ID NO: 11163
  oligonucleotide probe

SEQ ID NO: 33352 - DNA, 32 bp, Artificial; identical to SEQ ID NO: 11163
  oligonucleotide probe

SEQ ID NO: 33353 - DNA, 32 bp, Artificial; identical to SEQ ID NO: 13573
  oligonucleotide probe

SEQ ID NO: 33354 - DNA, 32 bp, Artificial; identical to SEQ ID NO: 13573
  oligonucleotide probe

SEQ ID NO: 33355 - DNA, 32 bp, Artificial; identical to SEQ ID NO: 13619
  oligonucleotide probe

SEQ ID NO: 33356 - DNA, 32 bp, Artificial; identical to SEQ ID NO: 13619
  oligonucleotide probe

SEQ ID NO: 33357 - DNA, 32 bp, Artificial; identical to SEQ ID NO: 11173
  oligonucleotide probe

SEQ ID NO: 33358 - DNA, 32 bp, Artificial; identical to SEQ ID NO: 11173
  oligonucleotide probe

SEQ ID NO: 33359 - DNA, 32 bp, Artificial; identical to SEQ ID NO: 11163
  oligonucleotide probe

SEQ ID NO: 33360 - DNA, 32 bp, Artificial; identical to SEQ ID NO: 11163
  oligonucleotide probe

SEQ ID NO: 33361 - DNA, 32 bp, Artificial; identical to SEQ ID NO: 11167
  oligonucleotide probe

SEQ ID NO: 33362 - DNA, 32 bp, Artificial; identical to SEQ ID NO: 11167
  oligonucleotide probe

SEQ ID NO: 33363 - DNA, 32 bp, Artificial; identical to SEQ ID NO: 11173
  oligonucleotide probe

SEQ ID NO: 33364 - DNA, 32 bp, Artificial; identical to SEQ ID NO: 11173
  oligonucleotide probe

SEQ ID NO: 33365 - DNA, 32 bp, Artificial; identical to SEQ ID NO: 13619
  oligonucleotide probe

SEQ ID NO: 33366 - DNA, 32 bp, Artificial; identical to SEQ ID NO: 13619
  oligonucleotide probe

SEQ ID NO: 33367 - DNA, 32 bp, Artificial; identical to SEQ ID NO: 11165
  oligonucleotide probe

SEQ ID NO: 33368 - DNA, 32 bp, Artificial; identical to SEQ ID NO: 11165
  oligonucleotide probe

SEQ ID NO: 33369 - DNA, 32 bp, Artificial; identical to SEQ ID NO: 11173
  oligonucleotide probe

SEQ ID NO: 33370 - DNA, 32 bp, Artificial; identical to SEQ ID NO: 11173
  oligonucleotide probe

SEQ ID NO: 33371 - DNA, 32 bp, Artificial; identical to SEQ ID NO: 11764
  oligonucleotide probe

SEQ ID NO: 33372 - DNA, 32 bp, Artificial; identical to SEQ ID NO: 11764
  oligonucleotide probe

SEQ ID NO: 33373 - DNA, 32 bp, Artificial; identical to SEQ ID NO: 13573
  oligonucleotide probe

SEQ ID NO: 33374 - DNA, 32 bp, Artificial; identical to SEQ ID NO: 13573
  oligonucleotide probe

SEQ ID NO: 33375 - DNA, 32 bp, Artificial; identical to SEQ ID NO: 13587
  oligonucleotide probe

SEQ ID NO: 33376 - DNA, 32 bp, Artificial; identical to SEQ ID NO: 13587
  oligonucleotide probe

SEQ ID NO: 33377 - DNA, 32 bp, Artificial; identical to SEQ ID NO: 11181
  oligonucleotide probe

SEQ ID NO: 33378 - DNA, 32 bp, Artificial; identical to SEQ ID NO: 11181
  oligonucleotide probe

SEQ ID NO: 33379 - DNA, 32 bp, Artificial; identical to SEQ ID NO: 11171
  oligonucleotide probe

SEQ ID NO: 33380 - DNA, 32 bp, Artificial; identical to SEQ ID NO: 11171
  oligonucleotide probe

SEQ ID NO: 33381 - DNA, 32 bp, Artificial; identical to SEQ ID NO: 13573
  oligonucleotide probe

SEQ ID NO: 33382 - DNA, 32 bp, Artificial; identical to SEQ ID NO: 13573
  oligonucleotide probe

SEQ ID NO: 33383 - DNA, 32 bp, Artificial; identical to SEQ ID NO: 11770
  oligonucleotide probe

SEQ ID NO: 33384 - DNA, 32 bp, Artificial; identical to SEQ ID NO: 11770
  oligonucleotide probe

SEQ ID NO: 33385 - DNA, 32 bp, Artificial; identical to SEQ ID NO: 11185
  oligonucleotide probe

SEQ ID NO: 33386 - DNA, 32 bp, Artificial; identical to SEQ ID NO: 11185
  oligonucleotide probe

SEQ ID NO: 33387 - DNA, 32 bp, Artificial; identical to SEQ ID NO: 11764
  oligonucleotide probe

SEQ ID NO: 33388 - DNA, 32 bp, Artificial; identical to SEQ ID NO: 11764
  oligonucleotide probe

SEQ ID NO: 33389 - DNA, 32 bp, Artificial; identical to SEQ ID NO: 13573
  oligonucleotide probe

SEQ ID NO: 33390 - DNA, 32 bp, Artificial; identical to SEQ ID NO: 13573
  oligonucleotide probe

SEQ ID NO: 33391 - DNA, 32 bp, Artificial; identical to SEQ ID NO: 11181
  oligonucleotide probe

SEQ ID NO: 33392 - DNA, 32 bp, Artificial; identical to SEQ ID NO: 11181
  oligonucleotide probe

SEQ ID NO: 33393 - DNA, 32 bp, Artificial; identical to SEQ ID NO: 11770
  oligonucleotide probe

SEQ ID NO: 33394 - DNA, 32 bp, Artificial; identical to SEQ ID NO: 11770
  oligonucleotide probe

SEQ ID NO: 33395 - DNA, 32 bp, Artificial; identical to SEQ ID NO: 11177
  oligonucleotide probe

SEQ ID NO: 33396 - DNA, 32 bp, Artificial; identical to SEQ ID NO: 11177
  oligonucleotide probe

SEQ ID NO: 33397 - DNA, 32 bp, Artificial; identical to SEQ ID NO: 11177
  oligonucleotide probe

SEQ ID NO: 33398 - DNA, 32 bp, Artificial; identical to SEQ ID NO: 11177
  oligonucleotide probe

SEQ ID NO: 33399 - DNA, 32 bp, Artificial; identical to SEQ ID NO: 11762
  oligonucleotide probe

SEQ ID NO: 33400 - DNA, 32 bp, Artificial; identical to SEQ ID NO: 11762
  oligonucleotide probe

SEQ ID NO: 33401 - DNA, 32 bp, Artificial; identical to SEQ ID NO: 11762
  oligonucleotide probe

SEQ ID NO: 33402 - DNA, 32 bp, Artificial; identical to SEQ ID NO: 11762
  oligonucleotide probe

SEQ ID NO: 33403 - DNA, 32 bp, Artificial; identical to SEQ ID NO: 13619
  oligonucleotide probe

SEQ ID NO: 33404 - DNA, 32 bp, Artificial; identical to SEQ ID NO: 13619
  oligonucleotide probe

SEQ ID NO: 33405 - DNA, 32 bp, Artificial; identical to SEQ ID NO: 11770
  oligonucleotide probe

SEQ ID NO: 33406 - DNA, 32 bp, Artificial; identical to SEQ ID NO: 11770
  oligonucleotide probe

SEQ ID NO: 33407 - DNA, 32 bp, Artificial; identical to SEQ ID NO: 13603
  oligonucleotide probe

SEQ ID NO: 33408 - DNA, 32 bp, Artificial; identical to SEQ ID NO: 13603
  oligonucleotide probe

SEQ ID NO: 33409 - DNA, 32 bp, Artificial; identical to SEQ ID NO: 11770
  oligonucleotide probe

SEQ ID NO: 33410 - DNA, 32 bp, Artificial; identical to SEQ ID NO: 11770
  oligonucleotide probe

SEQ ID NO: 33411 - DNA, 32 bp, Artificial; identical to SEQ ID NO: 11181
  oligonucleotide probe

SEQ ID NO: 33412 - DNA, 32 bp, Artificial; identical to SEQ ID NO: 11181
  oligonucleotide probe

SEQ ID NO: 33413 - DNA, 32 bp, Artificial; identical to SEQ ID NO: 13619
  oligonucleotide probe

SEQ ID NO: 33414 - DNA, 32 bp, Artificial; identical to SEQ ID NO: 13619
  oligonucleotide probe

SEQ ID NO: 33415 - DNA, 32 bp, Artificial; identical to SEQ ID NO: 11181
  oligonucleotide probe

SEQ ID NO: 33416 - DNA, 32 bp, Artificial; identical to SEQ ID NO: 11181
  oligonucleotide probe

SEQ ID NO: 33417 - DNA, 32 bp, Artificial; identical to SEQ ID NO: 11171
  oligonucleotide probe

SEQ ID NO: 33418 - DNA, 32 bp, Artificial; identical to SEQ ID NO: 11171
  oligonucleotide probe

SEQ ID NO: 33419 - DNA, 32 bp, Artificial; identical to SEQ ID NO: 13603
  oligonucleotide probe

SEQ ID NO: 33420 - DNA, 32 bp, Artificial; identical to SEQ ID NO: 13603
  oligonucleotide probe

SEQ ID NO: 33421 - DNA, 32 bp, Artificial; identical to SEQ ID NO: 13587
  oligonucleotide probe

SEQ ID NO: 33422 - DNA, 32 bp, Artificial; identical to SEQ ID NO: 13587
  oligonucleotide probe

SEQ ID NO: 33423 - DNA, 32 bp, Artificial; identical to SEQ ID NO: 11770
  oligonucleotide probe

SEQ ID NO: 33424 - DNA, 32 bp, Artificial; identical to SEQ ID NO: 11770
  oligonucleotide probe

SEQ ID NO: 33425 - DNA, 32 bp, Artificial; identical to SEQ ID NO: 11762
  oligonucleotide probe

SEQ ID NO: 33426 - DNA, 32 bp, Artificial; identical to SEQ ID NO: 11762
  oligonucleotide probe

SEQ ID NO: 33427 - DNA, 32 bp, Artificial; identical to SEQ ID NO: 13573
  oligonucleotide probe

SEQ ID NO: 33428 - DNA, 32 bp, Artificial; identical to SEQ ID NO: 13573
  oligonucleotide probe

SEQ ID NO: 33429 - DNA, 32 bp, Artificial; identical to SEQ ID NO: 11173
  oligonucleotide probe

SEQ ID NO: 33430 - DNA, 32 bp, Artificial; identical to SEQ ID NO: 11173
  oligonucleotide probe

SEQ ID NO: 33431 - DNA, 32 bp, Artificial; identical to SEQ ID NO: 13587
  oligonucleotide probe

SEQ ID NO: 33432 - DNA, 32 bp, Artificial; identical to SEQ ID NO: 13587
  oligonucleotide probe

SEQ ID NO: 33433 - DNA, 32 bp, Artificial; identical to SEQ ID NO: 13619
  oligonucleotide probe

SEQ ID NO: 33434 - DNA, 32 bp, Artificial; identical to SEQ ID NO: 13619
  oligonucleotide probe

SEQ ID NO: 33435 - DNA, 32 bp, Artificial; identical to SEQ ID NO: 13619
  oligonucleotide probe

SEQ ID NO: 33436 - DNA, 32 bp, Artificial; identical to SEQ ID NO: 13619
  oligonucleotide probe

SEQ ID NO: 33437 - DNA, 32 bp, Artificial; identical to SEQ ID NO: 13603
  oligonucleotide probe

SEQ ID NO: 33438 - DNA, 32 bp, Artificial; identical to SEQ ID NO: 13603
  oligonucleotide probe

SEQ ID NO: 33439 - DNA, 32 bp, Artificial; identical to SEQ ID NO: 13603
  oligonucleotide probe

SEQ ID NO: 33440 - DNA, 32 bp, Artificial; identical to SEQ ID NO: 13603
  oligonucleotide probe

SEQ ID NO: 33441 - DNA, 32 bp, Artificial; identical to SEQ ID NO: 13587
  oligonucleotide probe

SEQ ID NO: 33442 - DNA, 32 bp, Artificial; identical to SEQ ID NO: 13587
  oligonucleotide probe

SEQ ID NO: 33443 - DNA, 32 bp, Artificial; identical to SEQ ID NO: 13587
  oligonucleotide probe

SEQ ID NO: 33444 - DNA, 32 bp, Artificial; identical to SEQ ID NO: 13587
  oligonucleotide probe

SEQ ID NO: 33445 - DNA, 32 bp, Artificial; identical to SEQ ID NO: 13587
  oligonucleotide probe

SEQ ID NO: 33446 - DNA, 32 bp, Artificial; identical to SEQ ID NO: 13587
  oligonucleotide probe

SEQ ID NO: 33447 - DNA, 32 bp, Artificial; identical to SEQ ID NO: 11756
  oligonucleotide probe

SEQ ID NO: 33448 - DNA, 32 bp, Artificial; identical to SEQ ID NO: 11756
  oligonucleotide probe

SEQ ID NO: 33449 - DNA, 32 bp, Artificial; identical to SEQ ID NO: 13587
  oligonucleotide probe

SEQ ID NO: 33450 - DNA, 32 bp, Artificial; identical to SEQ ID NO: 13587
  oligonucleotide probe

SEQ ID NO: 33451 - DNA, 32 bp, Artificial; identical to SEQ ID NO: 13573
  oligonucleotide probe

SEQ ID NO: 33452 - DNA, 32 bp, Artificial; identical to SEQ ID NO: 13573
  oligonucleotide probe

SEQ ID NO: 33453 - DNA, 32 bp, Artificial; identical to SEQ ID NO: 11177
  oligonucleotide probe

SEQ ID NO: 33454 - DNA, 32 bp, Artificial; identical to SEQ ID NO: 11177
  oligonucleotide probe

SEQ ID NO: 33455 - DNA, 32 bp, Artificial; identical to SEQ ID NO: 13603
  oligonucleotide probe

SEQ ID NO: 33456 - DNA, 32 bp, Artificial; identical to SEQ ID NO: 13603
  oligonucleotide probe

SEQ ID NO: 33457 - DNA, 32 bp, Artificial; identical to SEQ ID NO: 13587
  oligonucleotide probe

SEQ ID NO: 33458 - DNA, 32 bp, Artificial; identical to SEQ ID NO: 13587
  oligonucleotide probe

SEQ ID NO: 33459 - DNA, 32 bp, Artificial; identical to SEQ ID NO: 11764
  oligonucleotide probe

SEQ ID NO: 33460 - DNA, 32 bp, Artificial; identical to SEQ ID NO: 11764
  oligonucleotide probe

SEQ ID NO: 33461 - DNA, 32 bp, Artificial; identical to SEQ ID NO: 13587
  oligonucleotide probe

SEQ ID NO: 33462 - DNA, 32 bp, Artificial; identical to SEQ ID NO: 13587
  oligonucleotide probe

SEQ ID NO: 33463 - DNA, 32 bp, Artificial; identical to SEQ ID NO: 11163
  oligonucleotide probe

SEQ ID NO: 33464 - DNA, 32 bp, Artificial; identical to SEQ ID NO: 11163
  oligonucleotide probe

SEQ ID NO: 33465 - DNA, 32 bp, Artificial; identical to SEQ ID NO: 11770
  oligonucleotide probe

SEQ ID NO: 33466 - DNA, 32 bp, Artificial; identical to SEQ ID NO: 11770
  oligonucleotide probe

SEQ ID NO: 33467 - DNA, 32 bp, Artificial; identical to SEQ ID NO: 11163
  oligonucleotide probe

SEQ ID NO: 33468 - DNA, 32 bp, Artificial; identical to SEQ ID NO: 11163
  oligonucleotide probe

SEQ ID NO: 33469 - DNA, 32 bp, Artificial; identical to SEQ ID NO: 13619
  oligonucleotide probe

SEQ ID NO: 33470 - DNA, 32 bp, Artificial; identical to SEQ ID NO: 13619
  oligonucleotide probe

SEQ ID NO: 33471 - DNA, 32 bp, Artificial; identical to SEQ ID NO: 11762
  oligonucleotide probe

SEQ ID NO: 33472 - DNA, 32 bp, Artificial; identical to SEQ ID NO: 11762
  oligonucleotide probe

SEQ ID NO: 33473 - DNA, 32 bp, Artificial; identical to SEQ ID NO: 13573
  oligonucleotide probe

SEQ ID NO: 33474 - DNA, 32 bp, Artificial; identical to SEQ ID NO: 13573
  oligonucleotide probe

SEQ ID NO: 33475 - DNA, 32 bp, Artificial; identical to SEQ ID NO: 13573
  oligonucleotide probe

SEQ ID NO: 33476 - DNA, 32 bp, Artificial; identical to SEQ ID NO: 13573
  oligonucleotide probe

SEQ ID NO: 33477 - DNA, 32 bp, Artificial; identical to SEQ ID NO: 11177
  oligonucleotide probe

SEQ ID NO: 33478 - DNA, 32 bp, Artificial; identical to SEQ ID NO: 11177
  oligonucleotide probe

SEQ ID NO: 33479 - DNA, 32 bp, Artificial; identical to SEQ ID NO: 13603
  oligonucleotide probe

SEQ ID NO: 33480 - DNA, 32 bp, Artificial; identical to SEQ ID NO: 13603
  oligonucleotide probe

SEQ ID NO: 33481 - DNA, 32 bp, Artificial; identical to SEQ ID NO: 13603
  oligonucleotide probe

SEQ ID NO: 33482 - DNA, 32 bp, Artificial; identical to SEQ ID NO: 13603
  oligonucleotide probe

SEQ ID NO: 33483 - DNA, 32 bp, Artificial; identical to SEQ ID NO: 11163
  oligonucleotide probe

SEQ ID NO: 33484 - DNA, 32 bp, Artificial; identical to SEQ ID NO: 11163
  oligonucleotide probe

SEQ ID NO: 33485 - DNA, 32 bp, Artificial; identical to SEQ ID NO: 13573
  oligonucleotide probe

SEQ ID NO: 33486 - DNA, 32 bp, Artificial; identical to SEQ ID NO: 13573
  oligonucleotide probe

SEQ ID NO: 33487 - DNA, 32 bp, Artificial; identical to SEQ ID NO: 11163
  oligonucleotide probe

SEQ ID NO: 33488 - DNA, 32 bp, Artificial; identical to SEQ ID NO: 11163
  oligonucleotide probe

SEQ ID NO: 33489 - DNA, 32 bp, Artificial; identical to SEQ ID NO: 11762
  oligonucleotide probe

SEQ ID NO: 33490 - DNA, 32 bp, Artificial; identical to SEQ ID NO: 11762
  oligonucleotide probe

SEQ ID NO: 33491 - DNA, 32 bp, Artificial; identical to SEQ ID NO: 11165
  oligonucleotide probe

SEQ ID NO: 33492 - DNA, 32 bp, Artificial; identical to SEQ ID NO: 11165
  oligonucleotide probe

SEQ ID NO: 33493 - DNA, 32 bp, Artificial; identical to SEQ ID NO: 11171
  oligonucleotide probe

SEQ ID NO: 33494 - DNA, 32 bp, Artificial; identical to SEQ ID NO: 11171
  oligonucleotide probe

SEQ ID NO: 33495 - DNA, 32 bp, Artificial; identical to SEQ ID NO: 13587
  oligonucleotide probe

SEQ ID NO: 33496 - DNA, 32 bp, Artificial; identical to SEQ ID NO: 13587
  oligonucleotide probe

SEQ ID NO: 33497 - DNA, 32 bp, Artificial; identical to SEQ ID NO: 13603
  oligonucleotide probe

SEQ ID NO: 33498 - DNA, 32 bp, Artificial; identical to SEQ ID NO: 13603
  oligonucleotide probe

SEQ ID NO: 33499 - DNA, 32 bp, Artificial; identical to SEQ ID NO: 13573
  oligonucleotide probe

SEQ ID NO: 33500 - DNA, 32 bp, Artificial; identical to SEQ ID NO: 13573
  oligonucleotide probe

SEQ ID NO: 33501 - DNA, 32 bp, Artificial; identical to SEQ ID NO: 11756
  oligonucleotide probe

SEQ ID NO: 33502 - DNA, 32 bp, Artificial; identical to SEQ ID NO: 11756
  oligonucleotide probe

SEQ ID NO: 33503 - DNA, 32 bp, Artificial; identical to SEQ ID NO: 13603
  oligonucleotide probe

SEQ ID NO: 33504 - DNA, 32 bp, Artificial; identical to SEQ ID NO: 13603
  oligonucleotide probe

SEQ ID NO: 33505 - DNA, 32 bp, Artificial; identical to SEQ ID NO: 13587
  oligonucleotide probe

SEQ ID NO: 33506 - DNA, 32 bp, Artificial; identical to SEQ ID NO: 13587
  oligonucleotide probe

SEQ ID NO: 33507 - DNA, 32 bp, Artificial; identical to SEQ ID NO: 11167
  oligonucleotide probe

SEQ ID NO: 33508 - DNA, 32 bp, Artificial; identical to SEQ ID NO: 11167
  oligonucleotide probe

SEQ ID NO: 33509 - DNA, 32 bp, Artificial; identical to SEQ ID NO: 13619
  oligonucleotide probe

SEQ ID NO: 33510 - DNA, 32 bp, Artificial; identical to SEQ ID NO: 13619
  oligonucleotide probe

SEQ ID NO: 33511 - DNA, 32 bp, Artificial; identical to SEQ ID NO: 13587
  oligonucleotide probe

SEQ ID NO: 33512 - DNA, 32 bp, Artificial; identical to SEQ ID NO: 13587
  oligonucleotide probe

SEQ ID NO: 33513 - DNA, 32 bp, Artificial; identical to SEQ ID NO: 13573
  oligonucleotide probe

SEQ ID NO: 33514 - DNA, 32 bp, Artificial; identical to SEQ ID NO: 13573
  oligonucleotide probe

SEQ ID NO: 33515 - DNA, 32 bp, Artificial; identical to SEQ ID NO: 11171
  oligonucleotide probe

SEQ ID NO: 33516 - DNA, 32 bp, Artificial; identical to SEQ ID NO: 11171
  oligonucleotide probe

SEQ ID NO: 33517 - DNA, 32 bp, Artificial; identical to SEQ ID NO: 11165
  oligonucleotide probe

SEQ ID NO: 33518 - DNA, 32 bp, Artificial; identical to SEQ ID NO: 11165
  oligonucleotide probe

SEQ ID NO: 33519 - DNA, 32 bp, Artificial; identical to SEQ ID NO: 11770
  oligonucleotide probe

SEQ ID NO: 33520 - DNA, 32 bp, Artificial; identical to SEQ ID NO: 11770
  oligonucleotide probe

SEQ ID NO: 33521 - DNA, 32 bp, Artificial; identical to SEQ ID NO: 13587
  oligonucleotide probe

SEQ ID NO: 33522 - DNA, 32 bp, Artificial; identical to SEQ ID NO: 13587
  oligonucleotide probe

SEQ ID NO: 33523 - DNA, 32 bp, Artificial; identical to SEQ ID NO: 13603
  oligonucleotide probe

SEQ ID NO: 33524 - DNA, 32 bp, Artificial; identical to SEQ ID NO: 13603
  oligonucleotide probe

SEQ ID NO: 33525 - DNA, 32 bp, Artificial; identical to SEQ ID NO: 13573
  oligonucleotide probe

SEQ ID NO: 33526 - DNA, 32 bp, Artificial; identical to SEQ ID NO: 13573
  oligonucleotide probe

SEQ ID NO: 33527 - DNA, 32 bp, Artificial; identical to SEQ ID NO: 13587
  oligonucleotide probe

SEQ ID NO: 33528 - DNA, 32 bp, Artificial; identical to SEQ ID NO: 13587
  oligonucleotide probe

SEQ ID NO: 33529 - DNA, 32 bp, Artificial; identical to SEQ ID NO: 13573
  oligonucleotide probe

SEQ ID NO: 33530 - DNA, 32 bp, Artificial; identical to SEQ ID NO: 13573
  oligonucleotide probe

SEQ ID NO: 33531 - DNA, 32 bp, Artificial; identical to SEQ ID NO: 11181
  oligonucleotide probe

SEQ ID NO: 33532 - DNA, 32 bp, Artificial; identical to SEQ ID NO: 11181
  oligonucleotide probe

SEQ ID NO: 33533 - DNA, 32 bp, Artificial; identical to SEQ ID NO: 11181
  oligonucleotide probe

SEQ ID NO: 33534 - DNA, 32 bp, Artificial; identical to SEQ ID NO: 11181
  oligonucleotide probe

SEQ ID NO: 33535 - DNA, 32 bp, Artificial; identical to SEQ ID NO: 13587
  oligonucleotide probe

SEQ ID NO: 33536 - DNA, 32 bp, Artificial; identical to SEQ ID NO: 13587
  oligonucleotide probe

SEQ ID NO: 33537 - DNA, 32 bp, Artificial; identical to SEQ ID NO: 11173
  oligonucleotide probe

SEQ ID NO: 33538 - DNA, 32 bp, Artificial; identical to SEQ ID NO: 11173
  oligonucleotide probe

SEQ ID NO: 33539 - DNA, 32 bp, Artificial; identical to SEQ ID NO: 13587
  oligonucleotide probe

SEQ ID NO: 33540 - DNA, 32 bp, Artificial; identical to SEQ ID NO: 13587
  oligonucleotide probe

SEQ ID NO: 33541 - DNA, 32 bp, Artificial; identical to SEQ ID NO: 11177
  oligonucleotide probe

SEQ ID NO: 33542 - DNA, 32 bp, Artificial; identical to SEQ ID NO: 11177
  oligonucleotide probe

SEQ ID NO: 33543 - DNA, 32 bp, Artificial; identical to SEQ ID NO: 13587
  oligonucleotide probe

SEQ ID NO: 33544 - DNA, 32 bp, Artificial; identical to SEQ ID NO: 13587
  oligonucleotide probe

SEQ ID NO: 33545 - DNA, 32 bp, Artificial; identical to SEQ ID NO: 11185
  oligonucleotide probe

SEQ ID NO: 33546 - DNA, 32 bp, Artificial; identical to SEQ ID NO: 11185
  oligonucleotide probe

SEQ ID NO: 33547 - DNA, 32 bp, Artificial; identical to SEQ ID NO: 13619
  oligonucleotide probe

SEQ ID NO: 33548 - DNA, 32 bp, Artificial; identical to SEQ ID NO: 13619
  oligonucleotide probe

SEQ ID NO: 33549 - DNA, 32 bp, Artificial; identical to SEQ ID NO: 13573
  oligonucleotide probe

SEQ ID NO: 33550 - DNA, 32 bp, Artificial; identical to SEQ ID NO: 13573
  oligonucleotide probe

SEQ ID NO: 33551 - DNA, 32 bp, Artificial; identical to SEQ ID NO: 11181
  oligonucleotide probe

SEQ ID NO: 33552 - DNA, 32 bp, Artificial; identical to SEQ ID NO: 11181
  oligonucleotide probe

SEQ ID NO: 33553 - DNA, 32 bp, Artificial; identical to SEQ ID NO: 13603
  oligonucleotide probe

SEQ ID NO: 33554 - DNA, 32 bp, Artificial; identical to SEQ ID NO: 13603
  oligonucleotide probe

SEQ ID NO: 33555 - DNA, 32 bp, Artificial; identical to SEQ ID NO: 11756
  oligonucleotide probe

SEQ ID NO: 33556 - DNA, 32 bp, Artificial; identical to SEQ ID NO: 11756
  oligonucleotide probe

SEQ ID NO: 33557 - DNA, 32 bp, Artificial; identical to SEQ ID NO: 11167
  oligonucleotide probe

SEQ ID NO: 33558 - DNA, 32 bp, Artificial; identical to SEQ ID NO: 11167
  oligonucleotide probe

SEQ ID NO: 33559 - DNA, 32 bp, Artificial; identical to SEQ ID NO: 13587
  oligonucleotide probe

SEQ ID NO: 33560 - DNA, 32 bp, Artificial; identical to SEQ ID NO: 13587
  oligonucleotide probe

SEQ ID NO: 33561 - DNA, 32 bp, Artificial; identical to SEQ ID NO: 13573
  oligonucleotide probe

SEQ ID NO: 33562 - DNA, 32 bp, Artificial; identical to SEQ ID NO: 13573
  oligonucleotide probe

SEQ ID NO: 33563 - DNA, 32 bp, Artificial; identical to SEQ ID NO: 13587
  oligonucleotide probe

SEQ ID NO: 33564 - DNA, 32 bp, Artificial; identical to SEQ ID NO: 13587
  oligonucleotide probe

SEQ ID NO: 33565 - DNA, 32 bp, Artificial; identical to SEQ ID NO: 13587
  oligonucleotide probe

SEQ ID NO: 33566 - DNA, 32 bp, Artificial; identical to SEQ ID NO: 13587
  oligonucleotide probe

SEQ ID NO: 33567 - DNA, 32 bp, Artificial; identical to SEQ ID NO: 13573
  oligonucleotide probe

SEQ ID NO: 33568 - DNA, 32 bp, Artificial; identical to SEQ ID NO: 13573
  oligonucleotide probe

SEQ ID NO: 33569 - DNA, 32 bp, Artificial; identical to SEQ ID NO: 11173
  oligonucleotide probe

SEQ ID NO: 33570 - DNA, 32 bp, Artificial; identical to SEQ ID NO: 11173
  oligonucleotide probe

SEQ ID NO: 33571 - DNA, 32 bp, Artificial; identical to SEQ ID NO: 13603
  oligonucleotide probe

SEQ ID NO: 33572 - DNA, 32 bp, Artificial; identical to SEQ ID NO: 13603
  oligonucleotide probe

SEQ ID NO: 33573 - DNA, 32 bp, Artificial; identical to SEQ ID NO: 11171
  oligonucleotide probe

SEQ ID NO: 33574 - DNA, 32 bp, Artificial; identical to SEQ ID NO: 11171
  oligonucleotide probe

SEQ ID NO: 33575 - DNA, 32 bp, Artificial; identical to SEQ ID NO: 13619
  oligonucleotide probe

SEQ ID NO: 33576 - DNA, 32 bp, Artificial; identical to SEQ ID NO: 13619
  oligonucleotide probe

SEQ ID NO: 33577 - DNA, 32 bp, Artificial; identical to SEQ ID NO: 11163
  oligonucleotide probe

SEQ ID NO: 33578 - DNA, 32 bp, Artificial; identical to SEQ ID NO: 11163
  oligonucleotide probe

SEQ ID NO: 33579 - DNA, 32 bp, Artificial; identical to SEQ ID NO: 11163
  oligonucleotide probe

SEQ ID NO: 33580 - DNA, 32 bp, Artificial; identical to SEQ ID NO: 11163
  oligonucleotide probe

SEQ ID NO: 33581 - DNA, 32 bp, Artificial; identical to SEQ ID NO: 11171
  oligonucleotide probe

SEQ ID NO: 33582 - DNA, 32 bp, Artificial; identical to SEQ ID NO: 11171
  oligonucleotide probe

SEQ ID NO: 33583 - DNA, 32 bp, Artificial; identical to SEQ ID NO: 11764
  oligonucleotide probe

SEQ ID NO: 33584 - DNA, 32 bp, Artificial; identical to SEQ ID NO: 11764
  oligonucleotide probe

SEQ ID NO: 33585 - DNA, 32 bp, Artificial; identical to SEQ ID NO: 13587
  oligonucleotide probe

SEQ ID NO: 33586 - DNA, 32 bp, Artificial; identical to SEQ ID NO: 13587
  oligonucleotide probe

SEQ ID NO: 33587 - DNA, 32 bp, Artificial; identical to SEQ ID NO: 11167
  oligonucleotide probe

SEQ ID NO: 33588 - DNA, 32 bp, Artificial; identical to SEQ ID NO: 11167
  oligonucleotide probe

SEQ ID NO: 33589 - DNA, 32 bp, Artificial; identical to SEQ ID NO: 11163
  oligonucleotide probe

SEQ ID NO: 33590 - DNA, 32 bp, Artificial; identical to SEQ ID NO: 11163
  oligonucleotide probe

SEQ ID NO: 33591 - DNA, 32 bp, Artificial; identical to SEQ ID NO: 11185
  oligonucleotide probe

SEQ ID NO: 33592 - DNA, 32 bp, Artificial; identical to SEQ ID NO: 11185
  oligonucleotide probe

SEQ ID NO: 33593 - DNA, 32 bp, Artificial; identical to SEQ ID NO: 13603
  oligonucleotide probe

SEQ ID NO: 33594 - DNA, 32 bp, Artificial; identical to SEQ ID NO: 13603
  oligonucleotide probe

SEQ ID NO: 33595 - DNA, 32 bp, Artificial; identical to SEQ ID NO: 11173
  oligonucleotide probe

SEQ ID NO: 33596 - DNA, 32 bp, Artificial; identical to SEQ ID NO: 11173
  oligonucleotide probe

SEQ ID NO: 33597 - DNA, 32 bp, Artificial; identical to SEQ ID NO: 11185
  oligonucleotide probe

SEQ ID NO: 33598 - DNA, 32 bp, Artificial; identical to SEQ ID NO: 11185
  oligonucleotide probe

SEQ ID NO: 33599 - DNA, 32 bp, Artificial; identical to SEQ ID NO: 11756
  oligonucleotide probe

SEQ ID NO: 33600 - DNA, 32 bp, Artificial; identical to SEQ ID NO: 11756
  oligonucleotide probe

SEQ ID NO: 33601 - DNA, 32 bp, Artificial; identical to SEQ ID NO: 13573
  oligonucleotide probe

SEQ ID NO: 33602 - DNA, 32 bp, Artificial; identical to SEQ ID NO: 13573
  oligonucleotide probe

SEQ ID NO: 33603 - DNA, 32 bp, Artificial; identical to SEQ ID NO: 11764
  oligonucleotide probe

SEQ ID NO: 33604 - DNA, 32 bp, Artificial; identical to SEQ ID NO: 11764
  oligonucleotide probe

SEQ ID NO: 33605 - DNA, 32 bp, Artificial; identical to SEQ ID NO: 13603
  oligonucleotide probe

SEQ ID NO: 33606 - DNA, 32 bp, Artificial; identical to SEQ ID NO: 13603
  oligonucleotide probe

SEQ ID NO: 33607 - DNA, 32 bp, Artificial; identical to SEQ ID NO: 11177
  oligonucleotide probe

SEQ ID NO: 33608 - DNA, 32 bp, Artificial; identical to SEQ ID NO: 11177
  oligonucleotide probe

SEQ ID NO: 33609 - DNA, 32 bp, Artificial; identical to SEQ ID NO: 13603
  oligonucleotide probe

SEQ ID NO: 33610 - DNA, 32 bp, Artificial; identical to SEQ ID NO: 13603
  oligonucleotide probe

SEQ ID NO: 33611 - DNA, 32 bp, Artificial; identical to SEQ ID NO: 13587
  oligonucleotide probe

SEQ ID NO: 33612 - DNA, 32 bp, Artificial; identical to SEQ ID NO: 13587
  oligonucleotide probe

SEQ ID NO: 33613 - DNA, 32 bp, Artificial; identical to SEQ ID NO: 13573
  oligonucleotide probe

SEQ ID NO: 33614 - DNA, 32 bp, Artificial; identical to SEQ ID NO: 13573
  oligonucleotide probe

SEQ ID NO: 33615 - DNA, 32 bp, Artificial; identical to SEQ ID NO: 11163
  oligonucleotide probe

SEQ ID NO: 33616 - DNA, 32 bp, Artificial; identical to SEQ ID NO: 11163
  oligonucleotide probe

SEQ ID NO: 33617 - DNA, 32 bp, Artificial; identical to SEQ ID NO: 11173
  oligonucleotide probe

SEQ ID NO: 33618 - DNA, 32 bp, Artificial; identical to SEQ ID NO: 11173
  oligonucleotide probe

SEQ ID NO: 33619 - DNA, 32 bp, Artificial; identical to SEQ ID NO: 11165
  oligonucleotide probe

SEQ ID NO: 33620 - DNA, 32 bp, Artificial; identical to SEQ ID NO: 11165
  oligonucleotide probe

SEQ ID NO: 33621 - DNA, 32 bp, Artificial; identical to SEQ ID NO: 11173
  oligonucleotide probe

SEQ ID NO: 33622 - DNA, 32 bp, Artificial; identical to SEQ ID NO: 11173
  oligonucleotide probe

SEQ ID NO: 33623 - DNA, 32 bp, Artificial; identical to SEQ ID NO: 13573
  oligonucleotide probe

SEQ ID NO: 33624 - DNA, 32 bp, Artificial; identical to SEQ ID NO: 13573
  oligonucleotide probe

SEQ ID NO: 33625 - DNA, 32 bp, Artificial; identical to SEQ ID NO: 11756
  oligonucleotide probe

SEQ ID NO: 33626 - DNA, 32 bp, Artificial; identical to SEQ ID NO: 11756
  oligonucleotide probe

SEQ ID NO: 33627 - DNA, 32 bp, Artificial; identical to SEQ ID NO: 11167
  oligonucleotide probe

SEQ ID NO: 33628 - DNA, 32 bp, Artificial; identical to SEQ ID NO: 11167
  oligonucleotide probe

SEQ ID NO: 33629 - DNA, 32 bp, Artificial; identical to SEQ ID NO: 11173
  oligonucleotide probe

SEQ ID NO: 33630 - DNA, 32 bp, Artificial; identical to SEQ ID NO: 11173
  oligonucleotide probe

SEQ ID NO: 33631 - DNA, 32 bp, Artificial; identical to SEQ ID NO: 11177
  oligonucleotide probe

SEQ ID NO: 33632 - DNA, 32 bp, Artificial; identical to SEQ ID NO: 11177
  oligonucleotide probe

SEQ ID NO: 33633 - DNA, 32 bp, Artificial; identical to SEQ ID NO: 13573
  oligonucleotide probe

SEQ ID NO: 33634 - DNA, 32 bp, Artificial; identical to SEQ ID NO: 13573
  oligonucleotide probe

SEQ ID NO: 33635 - DNA, 32 bp, Artificial; identical to SEQ ID NO: 11762
  oligonucleotide probe

SEQ ID NO: 33636 - DNA, 32 bp, Artificial; identical to SEQ ID NO: 11762
  oligonucleotide probe

SEQ ID NO: 33637 - DNA, 32 bp, Artificial; identical to SEQ ID NO: 11762
  oligonucleotide probe

SEQ ID NO: 33638 - DNA, 32 bp, Artificial; identical to SEQ ID NO: 11762
  oligonucleotide probe

SEQ ID NO: 33639 - DNA, 32 bp, Artificial; identical to SEQ ID NO: 13603
  oligonucleotide probe

SEQ ID NO: 33640 - DNA, 32 bp, Artificial; identical to SEQ ID NO: 13603
  oligonucleotide probe

SEQ ID NO: 33641 - DNA, 32 bp, Artificial; identical to SEQ ID NO: 13573
  oligonucleotide probe

SEQ ID NO: 33642 - DNA, 32 bp, Artificial; identical to SEQ ID NO: 13573
  oligonucleotide probe

SEQ ID NO: 33643 - DNA, 32 bp, Artificial; identical to SEQ ID NO: 13619
  oligonucleotide probe

SEQ ID NO: 33644 - DNA, 32 bp, Artificial; identical to SEQ ID NO: 13619
  oligonucleotide probe

SEQ ID NO: 33645 - DNA, 32 bp, Artificial; identical to SEQ ID NO: 11171
  oligonucleotide probe

SEQ ID NO: 33646 - DNA, 32 bp, Artificial; identical to SEQ ID NO: 11171
  oligonucleotide probe

SEQ ID NO: 33647 - DNA, 32 bp, Artificial; identical to SEQ ID NO: 13619
  oligonucleotide probe

SEQ ID NO: 33648 - DNA, 32 bp, Artificial; identical to SEQ ID NO: 13619
  oligonucleotide probe

SEQ ID NO: 33649 - DNA, 32 bp, Artificial; identical to SEQ ID NO: 13619
  oligonucleotide probe

SEQ ID NO: 33650 - DNA, 32 bp, Artificial; identical to SEQ ID NO: 13619
  oligonucleotide probe

SEQ ID NO: 33651 - DNA, 32 bp, Artificial; identical to SEQ ID NO: 11167
  oligonucleotide probe

SEQ ID NO: 33652 - DNA, 32 bp, Artificial; identical to SEQ ID NO: 11167
  oligonucleotide probe

SEQ ID NO: 33653 - DNA, 32 bp, Artificial; identical to SEQ ID NO: 13587
  oligonucleotide probe

SEQ ID NO: 33654 - DNA, 32 bp, Artificial; identical to SEQ ID NO: 13587
  oligonucleotide probe

SEQ ID NO: 33655 - DNA, 32 bp, Artificial; identical to SEQ ID NO: 13603
  oligonucleotide probe

SEQ ID NO: 33656 - DNA, 32 bp, Artificial; identical to SEQ ID NO: 13603
  oligonucleotide probe

SEQ ID NO: 33657 - DNA, 32 bp, Artificial; identical to SEQ ID NO: 11181
  oligonucleotide probe

SEQ ID NO: 33658 - DNA, 32 bp, Artificial; identical to SEQ ID NO: 11181
  oligonucleotide probe

SEQ ID NO: 33659 - DNA, 32 bp, Artificial; identical to SEQ ID NO: 11756
  oligonucleotide probe

SEQ ID NO: 33660 - DNA, 32 bp, Artificial; identical to SEQ ID NO: 11756
  oligonucleotide probe

SEQ ID NO: 33661 - DNA, 32 bp, Artificial; identical to SEQ ID NO: 13603
  oligonucleotide probe

SEQ ID NO: 33662 - DNA, 32 bp, Artificial; identical to SEQ ID NO: 13603
  oligonucleotide probe

SEQ ID NO: 33663 - DNA, 32 bp, Artificial; identical to SEQ ID NO: 13619
  oligonucleotide probe

SEQ ID NO: 33664 - DNA, 32 bp, Artificial; identical to SEQ ID NO: 13619
  oligonucleotide probe

SEQ ID NO: 33665 - DNA, 32 bp, Artificial; identical to SEQ ID NO: 11171
  oligonucleotide probe

SEQ ID NO: 33666 - DNA, 32 bp, Artificial; identical to SEQ ID NO: 11171
  oligonucleotide probe

SEQ ID NO: 33667 - DNA, 32 bp, Artificial; identical to SEQ ID NO: 11756
  oligonucleotide probe

SEQ ID NO: 33668 - DNA, 32 bp, Artificial; identical to SEQ ID NO: 11756
  oligonucleotide probe

SEQ ID NO: 33669 - DNA, 32 bp, Artificial; identical to SEQ ID NO: 11185
  oligonucleotide probe

SEQ ID NO: 33670 - DNA, 32 bp, Artificial; identical to SEQ ID NO: 11185
  oligonucleotide probe

SEQ ID NO: 33671 - DNA, 32 bp, Artificial; identical to SEQ ID NO: 13619
  oligonucleotide probe

SEQ ID NO: 33672 - DNA, 32 bp, Artificial; identical to SEQ ID NO: 13619
  oligonucleotide probe

SEQ ID NO: 33673 - DNA, 32 bp, Artificial; identical to SEQ ID NO: 11171
  oligonucleotide probe

SEQ ID NO: 33674 - DNA, 32 bp, Artificial; identical to SEQ ID NO: 11171
  oligonucleotide probe

SEQ ID NO: 33675 - DNA, 32 bp, Artificial; identical to SEQ ID NO: 13619
  oligonucleotide probe

SEQ ID NO: 33676 - DNA, 32 bp, Artificial; identical to SEQ ID NO: 13619
  oligonucleotide probe

SEQ ID NO: 33677 - DNA, 32 bp, Artificial; identical to SEQ ID NO: 13573
  oligonucleotide probe

SEQ ID NO: 33678 - DNA, 32 bp, Artificial; identical to SEQ ID NO: 13573
  oligonucleotide probe

SEQ ID NO: 33679 - DNA, 32 bp, Artificial; identical to SEQ ID NO: 11177
  oligonucleotide probe

SEQ ID NO: 33680 - DNA, 32 bp, Artificial; identical to SEQ ID NO: 11177
  oligonucleotide probe

SEQ ID NO: 33681 - DNA, 32 bp, Artificial; identical to SEQ ID NO: 11171
  oligonucleotide probe

SEQ ID NO: 33682 - DNA, 32 bp, Artificial; identical to SEQ ID NO: 11171
  oligonucleotide probe

SEQ ID NO: 33683 - DNA, 32 bp, Artificial; identical to SEQ ID NO: 13619
  oligonucleotide probe

SEQ ID NO: 33684 - DNA, 32 bp, Artificial; identical to SEQ ID NO: 13619
  oligonucleotide probe

SEQ ID NO: 33685 - DNA, 32 bp, Artificial; identical to SEQ ID NO: 11173
  oligonucleotide probe

SEQ ID NO: 33686 - DNA, 32 bp, Artificial; identical to SEQ ID NO: 11173
  oligonucleotide probe

SEQ ID NO: 33687 - DNA, 32 bp, Artificial; identical to SEQ ID NO: 11756
  oligonucleotide probe

SEQ ID NO: 33688 - DNA, 32 bp, Artificial; identical to SEQ ID NO: 11756
  oligonucleotide probe

SEQ ID NO: 33689 - DNA, 32 bp, Artificial; identical to SEQ ID NO: 13603
  oligonucleotide probe

SEQ ID NO: 33690 - DNA, 32 bp, Artificial; identical to SEQ ID NO: 13603
  oligonucleotide probe

SEQ ID NO: 33691 - DNA, 32 bp, Artificial; identical to SEQ ID NO: 13603
  oligonucleotide probe

SEQ ID NO: 33692 - DNA, 32 bp, Artificial; identical to SEQ ID NO: 13603
  oligonucleotide probe

SEQ ID NO: 33693 - DNA, 32 bp, Artificial; identical to SEQ ID NO: 13573
  oligonucleotide probe

SEQ ID NO: 33694 - DNA, 32 bp, Artificial; identical to SEQ ID NO: 13573
  oligonucleotide probe

SEQ ID NO: 33695 - DNA, 32 bp, Artificial; identical to SEQ ID NO: 13603
  oligonucleotide probe

SEQ ID NO: 33696 - DNA, 32 bp, Artificial; identical to SEQ ID NO: 13603
  oligonucleotide probe

SEQ ID NO: 33697 - DNA, 32 bp, Artificial; identical to SEQ ID NO: 13603
  oligonucleotide probe

SEQ ID NO: 33698 - DNA, 32 bp, Artificial; identical to SEQ ID NO: 13603
  oligonucleotide probe

SEQ ID NO: 33699 - DNA, 32 bp, Artificial; identical to SEQ ID NO: 11181
  oligonucleotide probe

SEQ ID NO: 33700 - DNA, 32 bp, Artificial; identical to SEQ ID NO: 11181
  oligonucleotide probe

SEQ ID NO: 33701 - DNA, 32 bp, Artificial; identical to SEQ ID NO: 11163
  oligonucleotide probe

SEQ ID NO: 33702 - DNA, 32 bp, Artificial; identical to SEQ ID NO: 11163
  oligonucleotide probe

SEQ ID NO: 33703 - DNA, 32 bp, Artificial; identical to SEQ ID NO: 11764
  oligonucleotide probe

SEQ ID NO: 33704 - DNA, 32 bp, Artificial; identical to SEQ ID NO: 11764
  oligonucleotide probe

SEQ ID NO: 33705 - DNA, 32 bp, Artificial; identical to SEQ ID NO: 13603
  oligonucleotide probe

SEQ ID NO: 33706 - DNA, 32 bp, Artificial; identical to SEQ ID NO: 13603
  oligonucleotide probe

SEQ ID NO: 33707 - DNA, 32 bp, Artificial; identical to SEQ ID NO: 11762
  oligonucleotide probe

SEQ ID NO: 33708 - DNA, 32 bp, Artificial; identical to SEQ ID NO: 11762
  oligonucleotide probe

SEQ ID NO: 33709 - DNA, 32 bp, Artificial; identical to SEQ ID NO: 11163
  oligonucleotide probe

SEQ ID NO: 33710 - DNA, 32 bp, Artificial; identical to SEQ ID NO: 11163
  oligonucleotide probe

SEQ ID NO: 33711 - DNA, 32 bp, Artificial; identical to SEQ ID NO: 11185
  oligonucleotide probe

SEQ ID NO: 33712 - DNA, 32 bp, Artificial; identical to SEQ ID NO: 11185
  oligonucleotide probe

SEQ ID NO: 33713 - DNA, 32 bp, Artificial; identical to SEQ ID NO: 11177
  oligonucleotide probe

SEQ ID NO: 33714 - DNA, 32 bp, Artificial; identical to SEQ ID NO: 11177
  oligonucleotide probe

SEQ ID NO: 33715 - DNA, 32 bp, Artificial; identical to SEQ ID NO: 11163
  oligonucleotide probe

SEQ ID NO: 33716 - DNA, 32 bp, Artificial; identical to SEQ ID NO: 11163
  oligonucleotide probe

SEQ ID NO: 33717 - DNA, 32 bp, Artificial; identical to SEQ ID NO: 11165
  oligonucleotide probe

SEQ ID NO: 33718 - DNA, 32 bp, Artificial; identical to SEQ ID NO: 11165
  oligonucleotide probe

SEQ ID NO: 33719 - DNA, 32 bp, Artificial; identical to SEQ ID NO: 11167
  oligonucleotide probe

SEQ ID NO: 33720 - DNA, 32 bp, Artificial; identical to SEQ ID NO: 11167
  oligonucleotide probe

SEQ ID NO: 33721 - DNA, 32 bp, Artificial; identical to SEQ ID NO: 11762
  oligonucleotide probe

SEQ ID NO: 33722 - DNA, 32 bp, Artificial; identical to SEQ ID NO: 11762
  oligonucleotide probe

SEQ ID NO: 33723 - DNA, 32 bp, Artificial; identical to SEQ ID NO: 11181
  oligonucleotide probe

SEQ ID NO: 33724 - DNA, 32 bp, Artificial; identical to SEQ ID NO: 11181
  oligonucleotide probe

SEQ ID NO: 33725 - DNA, 32 bp, Artificial; identical to SEQ ID NO: 13603
  oligonucleotide probe

SEQ ID NO: 33726 - DNA, 32 bp, Artificial; identical to SEQ ID NO: 13603
  oligonucleotide probe

SEQ ID NO: 33727 - DNA, 32 bp, Artificial; identical to SEQ ID NO: 11165
  oligonucleotide probe

SEQ ID NO: 33728 - DNA, 32 bp, Artificial; identical to SEQ ID NO: 11165
  oligonucleotide probe

SEQ ID NO: 33729 - DNA, 32 bp, Artificial; identical to SEQ ID NO: 13619
  oligonucleotide probe

SEQ ID NO: 33730 - DNA, 32 bp, Artificial; identical to SEQ ID NO: 13619
  oligonucleotide probe

SEQ ID NO: 33731 - DNA, 32 bp, Artificial; identical to SEQ ID NO: 11185
  oligonucleotide probe

SEQ ID NO: 33732 - DNA, 32 bp, Artificial; identical to SEQ ID NO: 11185
  oligonucleotide probe

SEQ ID NO: 33733 - DNA, 32 bp, Artificial; identical to SEQ ID NO: 13573
  oligonucleotide probe

SEQ ID NO: 33734 - DNA, 32 bp, Artificial; identical to SEQ ID NO: 13573
  oligonucleotide probe

SEQ ID NO: 33735 - DNA, 32 bp, Artificial; identical to SEQ ID NO: 13587
  oligonucleotide probe

SEQ ID NO: 33736 - DNA, 32 bp, Artificial; identical to SEQ ID NO: 13587
  oligonucleotide probe

SEQ ID NO: 33737 - DNA, 32 bp, Artificial; identical to SEQ ID NO: 13619
  oligonucleotide probe

SEQ ID NO: 33738 - DNA, 32 bp, Artificial; identical to SEQ ID NO: 13619
  oligonucleotide probe

SEQ ID NO: 33739 - DNA, 32 bp, Artificial; identical to SEQ ID NO: 13573
  oligonucleotide probe

SEQ ID NO: 33740 - DNA, 32 bp, Artificial; identical to SEQ ID NO: 13573
  oligonucleotide probe

SEQ ID NO: 33741 - DNA, 32 bp, Artificial; identical to SEQ ID NO: 11177
  oligonucleotide probe

SEQ ID NO: 33742 - DNA, 32 bp, Artificial; identical to SEQ ID NO: 11177
  oligonucleotide probe

SEQ ID NO: 33743 - DNA, 32 bp, Artificial; identical to SEQ ID NO: 11770
  oligonucleotide probe

SEQ ID NO: 33744 - DNA, 32 bp, Artificial; identical to SEQ ID NO: 11770
  oligonucleotide probe

SEQ ID NO: 33745 - DNA, 32 bp, Artificial; identical to SEQ ID NO: 13619
  oligonucleotide probe

SEQ ID NO: 33746 - DNA, 32 bp, Artificial; identical to SEQ ID NO: 13619
  oligonucleotide probe

SEQ ID NO: 33747 - DNA, 32 bp, Artificial; identical to SEQ ID NO: 13619
  oligonucleotide probe

SEQ ID NO: 33748 - DNA, 32 bp, Artificial; identical to SEQ ID NO: 13619
  oligonucleotide probe

SEQ ID NO: 33749 - DNA, 32 bp, Artificial; identical to SEQ ID NO: 13587
  oligonucleotide probe

SEQ ID NO: 33750 - DNA, 32 bp, Artificial; identical to SEQ ID NO: 13587
  oligonucleotide probe

SEQ ID NO: 33751 - DNA, 32 bp, Artificial; identical to SEQ ID NO: 11163
  oligonucleotide probe

SEQ ID NO: 33752 - DNA, 32 bp, Artificial; identical to SEQ ID NO: 11163
  oligonucleotide probe

SEQ ID NO: 33753 - DNA, 32 bp, Artificial; identical to SEQ ID NO: 11165
  oligonucleotide probe

SEQ ID NO: 33754 - DNA, 32 bp, Artificial; identical to SEQ ID NO: 11165
  oligonucleotide probe

SEQ ID NO: 33755 - DNA, 32 bp, Artificial; identical to SEQ ID NO: 11756
  oligonucleotide probe

SEQ ID NO: 33756 - DNA, 32 bp, Artificial; identical to SEQ ID NO: 11756
  oligonucleotide probe

SEQ ID NO: 33757 - DNA, 32 bp, Artificial; identical to SEQ ID NO: 11173
  oligonucleotide probe

SEQ ID NO: 33758 - DNA, 32 bp, Artificial; identical to SEQ ID NO: 11173
  oligonucleotide probe

SEQ ID NO: 33759 - DNA, 32 bp, Artificial; identical to SEQ ID NO: 13603
  oligonucleotide probe

SEQ ID NO: 33760 - DNA, 32 bp, Artificial; identical to SEQ ID NO: 13603
  oligonucleotide probe

SEQ ID NO: 33761 - DNA, 32 bp, Artificial; identical to SEQ ID NO: 11181
  oligonucleotide probe

SEQ ID NO: 33762 - DNA, 32 bp, Artificial; identical to SEQ ID NO: 11181
  oligonucleotide probe

SEQ ID NO: 33763 - DNA, 32 bp, Artificial; identical to SEQ ID NO: 11762
  oligonucleotide probe

SEQ ID NO: 33764 - DNA, 32 bp, Artificial; identical to SEQ ID NO: 11762
  oligonucleotide probe

SEQ ID NO: 33765 - DNA, 32 bp, Artificial; identical to SEQ ID NO: 13619
  oligonucleotide probe

SEQ ID NO: 33766 - DNA, 32 bp, Artificial; identical to SEQ ID NO: 13619
  oligonucleotide probe

SEQ ID NO: 33767 - DNA, 32 bp, Artificial; identical to SEQ ID NO: 13573
  oligonucleotide probe

SEQ ID NO: 33768 - DNA, 32 bp, Artificial; identical to SEQ ID NO: 13573
  oligonucleotide probe

SEQ ID NO: 33769 - DNA, 32 bp, Artificial; identical to SEQ ID NO: 11165
  oligonucleotide probe

SEQ ID NO: 33770 - DNA, 32 bp, Artificial; identical to SEQ ID NO: 11165
  oligonucleotide probe

SEQ ID NO: 33771 - DNA, 32 bp, Artificial; identical to SEQ ID NO: 13587
  oligonucleotide probe

SEQ ID NO: 33772 - DNA, 32 bp, Artificial; identical to SEQ ID NO: 13587
  oligonucleotide probe

SEQ ID NO: 33773 - DNA, 32 bp, Artificial; identical to SEQ ID NO: 11177
  oligonucleotide probe

SEQ ID NO: 33774 - DNA, 32 bp, Artificial; identical to SEQ ID NO: 11177
  oligonucleotide probe

SEQ ID NO: 33775 - DNA, 32 bp, Artificial; identical to SEQ ID NO: 11185
  oligonucleotide probe

SEQ ID NO: 33776 - DNA, 32 bp, Artificial; identical to SEQ ID NO: 11185
  oligonucleotide probe

SEQ ID NO: 33777 - DNA, 32 bp, Artificial; identical to SEQ ID NO: 11163
  oligonucleotide probe

SEQ ID NO: 33778 - DNA, 32 bp, Artificial; identical to SEQ ID NO: 11163
  oligonucleotide probe

SEQ ID NO: 33779 - DNA, 32 bp, Artificial; identical to SEQ ID NO: 11171
  oligonucleotide probe

SEQ ID NO: 33780 - DNA, 32 bp, Artificial; identical to SEQ ID NO: 11171
  oligonucleotide probe

SEQ ID NO: 33781 - DNA, 32 bp, Artificial; identical to SEQ ID NO: 13619
  oligonucleotide probe

SEQ ID NO: 33782 - DNA, 32 bp, Artificial; identical to SEQ ID NO: 13619
  oligonucleotide probe

SEQ ID NO: 33783 - DNA, 32 bp, Artificial; identical to SEQ ID NO: 13573
  oligonucleotide probe

SEQ ID NO: 33784 - DNA, 32 bp, Artificial; identical to SEQ ID NO: 13573
  oligonucleotide probe

SEQ ID NO: 33785 - DNA, 32 bp, Artificial; identical to SEQ ID NO: 11181
  oligonucleotide probe

SEQ ID NO: 33786 - DNA, 32 bp, Artificial; identical to SEQ ID NO: 11181
  oligonucleotide probe

SEQ ID NO: 33787 - DNA, 32 bp, Artificial; identical to SEQ ID NO: 11165
  oligonucleotide probe

SEQ ID NO: 33788 - DNA, 32 bp, Artificial; identical to SEQ ID NO: 11165
  oligonucleotide probe

SEQ ID NO: 33789 - DNA, 32 bp, Artificial; identical to SEQ ID NO: 11171
  oligonucleotide probe

SEQ ID NO: 33790 - DNA, 32 bp, Artificial; identical to SEQ ID NO: 11171
  oligonucleotide probe

SEQ ID NO: 33791 - DNA, 32 bp, Artificial; identical to SEQ ID NO: 13603
  oligonucleotide probe

SEQ ID NO: 33792 - DNA, 32 bp, Artificial; identical to SEQ ID NO: 13603
  oligonucleotide probe

SEQ ID NO: 33793 - DNA, 32 bp, Artificial; identical to SEQ ID NO: 11163
  oligonucleotide probe

SEQ ID NO: 33794 - DNA, 32 bp, Artificial; identical to SEQ ID NO: 11163
  oligonucleotide probe

SEQ ID NO: 33795 - DNA, 32 bp, Artificial; identical to SEQ ID NO: 11185
  oligonucleotide probe

SEQ ID NO: 33796 - DNA, 32 bp, Artificial; identical to SEQ ID NO: 11185
  oligonucleotide probe

SEQ ID NO: 33797 - DNA, 32 bp, Artificial; identical to SEQ ID NO: 11177
  oligonucleotide probe

SEQ ID NO: 33798 - DNA, 32 bp, Artificial; identical to SEQ ID NO: 11177
  oligonucleotide probe

SEQ ID NO: 33799 - DNA, 32 bp, Artificial; identical to SEQ ID NO: 11756
  oligonucleotide probe

SEQ ID NO: 33800 - DNA, 32 bp, Artificial; identical to SEQ ID NO: 11756
  oligonucleotide probe

SEQ ID NO: 33801 - DNA, 32 bp, Artificial; identical to SEQ ID NO: 13619
  oligonucleotide probe

SEQ ID NO: 33802 - DNA, 32 bp, Artificial; identical to SEQ ID NO: 13619
  oligonucleotide probe

SEQ ID NO: 33803 - DNA, 32 bp, Artificial; identical to SEQ ID NO: 11177
  oligonucleotide probe

SEQ ID NO: 33804 - DNA, 32 bp, Artificial; identical to SEQ ID NO: 11177
  oligonucleotide probe

SEQ ID NO: 33805 - DNA, 32 bp, Artificial; identical to SEQ ID NO: 13587
  oligonucleotide probe

SEQ ID NO: 33806 - DNA, 32 bp, Artificial; identical to SEQ ID NO: 13587
  oligonucleotide probe

SEQ ID NO: 33807 - DNA, 32 bp, Artificial; identical to SEQ ID NO: 13587
  oligonucleotide probe

SEQ ID NO: 33808 - DNA, 32 bp, Artificial; identical to SEQ ID NO: 13587
  oligonucleotide probe

SEQ ID NO: 33809 - DNA, 32 bp, Artificial; identical to SEQ ID NO: 13587
  oligonucleotide probe

SEQ ID NO: 33810 - DNA, 32 bp, Artificial; identical to SEQ ID NO: 13587
  oligonucleotide probe

SEQ ID NO: 33811 - DNA, 32 bp, Artificial; identical to SEQ ID NO: 11177
  oligonucleotide probe

SEQ ID NO: 33812 - DNA, 32 bp, Artificial; identical to SEQ ID NO: 11177
  oligonucleotide probe

SEQ ID NO: 33813 - DNA, 32 bp, Artificial; identical to SEQ ID NO: 13573
  oligonucleotide probe

SEQ ID NO: 33814 - DNA, 32 bp, Artificial; identical to SEQ ID NO: 13573
  oligonucleotide probe

SEQ ID NO: 33815 - DNA, 32 bp, Artificial; identical to SEQ ID NO: 11185
  oligonucleotide probe

SEQ ID NO: 33816 - DNA, 32 bp, Artificial; identical to SEQ ID NO: 11185
  oligonucleotide probe

SEQ ID NO: 33817 - DNA, 32 bp, Artificial; identical to SEQ ID NO: 11173
  oligonucleotide probe

SEQ ID NO: 33818 - DNA, 32 bp, Artificial; identical to SEQ ID NO: 11173
  oligonucleotide probe

SEQ ID NO: 33819 - DNA, 32 bp, Artificial; identical to SEQ ID NO: 11762
  oligonucleotide probe

SEQ ID NO: 33820 - DNA, 32 bp, Artificial; identical to SEQ ID NO: 11762
  oligonucleotide probe

SEQ ID NO: 33821 - DNA, 32 bp, Artificial; identical to SEQ ID NO: 11163
  oligonucleotide probe

SEQ ID NO: 33822 - DNA, 32 bp, Artificial; identical to SEQ ID NO: 11163
  oligonucleotide probe

SEQ ID NO: 33823 - DNA, 32 bp, Artificial; identical to SEQ ID NO: 11762
  oligonucleotide probe

SEQ ID NO: 33824 - DNA, 32 bp, Artificial; identical to SEQ ID NO: 11762
  oligonucleotide probe

SEQ ID NO: 33825 - DNA, 32 bp, Artificial; identical to SEQ ID NO: 11181
  oligonucleotide probe

SEQ ID NO: 33826 - DNA, 32 bp, Artificial; identical to SEQ ID NO: 11181
  oligonucleotide probe

SEQ ID NO: 33827 - DNA, 32 bp, Artificial; identical to SEQ ID NO: 11770
  oligonucleotide probe

SEQ ID NO: 33828 - DNA, 32 bp, Artificial; identical to SEQ ID NO: 11770
  oligonucleotide probe

SEQ ID NO: 33829 - DNA, 32 bp, Artificial; identical to SEQ ID NO: 13619
  oligonucleotide probe

SEQ ID NO: 33830 - DNA, 32 bp, Artificial; identical to SEQ ID NO: 13619
  oligonucleotide probe

SEQ ID NO: 33831 - DNA, 32 bp, Artificial; identical to SEQ ID NO: 11762
  oligonucleotide probe

SEQ ID NO: 33832 - DNA, 32 bp, Artificial; identical to SEQ ID NO: 11762
  oligonucleotide probe

SEQ ID NO: 33833 - DNA, 32 bp, Artificial; identical to SEQ ID NO: 11764
  oligonucleotide probe

SEQ ID NO: 33834 - DNA, 32 bp, Artificial; identical to SEQ ID NO: 11764
  oligonucleotide probe

SEQ ID NO: 33835 - DNA, 32 bp, Artificial; identical to SEQ ID NO: 11770
  oligonucleotide probe

SEQ ID NO: 33836 - DNA, 32 bp, Artificial; identical to SEQ ID NO: 11770
  oligonucleotide probe

SEQ ID NO: 33837 - DNA, 32 bp, Artificial; identical to SEQ ID NO: 11165
  oligonucleotide probe

SEQ ID NO: 33838 - DNA, 32 bp, Artificial; identical to SEQ ID NO: 11165
  oligonucleotide probe

SEQ ID NO: 33839 - DNA, 32 bp, Artificial; identical to SEQ ID NO: 11770
  oligonucleotide probe

SEQ ID NO: 33840 - DNA, 32 bp, Artificial; identical to SEQ ID NO: 11770
  oligonucleotide probe

SEQ ID NO: 33841 - DNA, 32 bp, Artificial; identical to SEQ ID NO: 11171
  oligonucleotide probe

SEQ ID NO: 33842 - DNA, 32 bp, Artificial; identical to SEQ ID NO: 11171
  oligonucleotide probe

SEQ ID NO: 33843 - DNA, 32 bp, Artificial; identical to SEQ ID NO: 11770
  oligonucleotide probe

SEQ ID NO: 33844 - DNA, 32 bp, Artificial; identical to SEQ ID NO: 11770
  oligonucleotide probe

SEQ ID NO: 33845 - DNA, 32 bp, Artificial; identical to SEQ ID NO: 11762
  oligonucleotide probe

SEQ ID NO: 33846 - DNA, 32 bp, Artificial; identical to SEQ ID NO: 11762
  oligonucleotide probe

SEQ ID NO: 33847 - DNA, 32 bp, Artificial; identical to SEQ ID NO: 13587
  oligonucleotide probe

SEQ ID NO: 33848 - DNA, 32 bp, Artificial; identical to SEQ ID NO: 13587
  oligonucleotide probe

SEQ ID NO: 33849 - DNA, 32 bp, Artificial; identical to SEQ ID NO: 13619
  oligonucleotide probe

SEQ ID NO: 33850 - DNA, 32 bp, Artificial; identical to SEQ ID NO: 13619
  oligonucleotide probe

SEQ ID NO: 33851 - DNA, 32 bp, Artificial; identical to SEQ ID NO: 11167
  oligonucleotide probe

SEQ ID NO: 33852 - DNA, 32 bp, Artificial; identical to SEQ ID NO: 11167
  oligonucleotide probe

SEQ ID NO: 33853 - DNA, 32 bp, Artificial; identical to SEQ ID NO: 13619
  oligonucleotide probe

SEQ ID NO: 33854 - DNA, 32 bp, Artificial; identical to SEQ ID NO: 13619
  oligonucleotide probe

SEQ ID NO: 33855 - DNA, 32 bp, Artificial; identical to SEQ ID NO: 13603
  oligonucleotide probe

SEQ ID NO: 33856 - DNA, 32 bp, Artificial; identical to SEQ ID NO: 13603
  oligonucleotide probe

SEQ ID NO: 33857 - DNA, 32 bp, Artificial; identical to SEQ ID NO: 11167
  oligonucleotide probe

SEQ ID NO: 33858 - DNA, 32 bp, Artificial; identical to SEQ ID NO: 11167
  oligonucleotide probe

SEQ ID NO: 33859 - DNA, 32 bp, Artificial; identical to SEQ ID NO: 11167
  oligonucleotide probe

SEQ ID NO: 33860 - DNA, 32 bp, Artificial; identical to SEQ ID NO: 11167
  oligonucleotide probe

SEQ ID NO: 33861 - DNA, 32 bp, Artificial; identical to SEQ ID NO: 13573
  oligonucleotide probe

SEQ ID NO: 33862 - DNA, 32 bp, Artificial; identical to SEQ ID NO: 13573
  oligonucleotide probe

SEQ ID NO: 33863 - DNA, 32 bp, Artificial; identical to SEQ ID NO: 11163
  oligonucleotide probe

SEQ ID NO: 33864 - DNA, 32 bp, Artificial; identical to SEQ ID NO: 11163
  oligonucleotide probe

SEQ ID NO: 33865 - DNA, 32 bp, Artificial; identical to SEQ ID NO: 11171
  oligonucleotide probe

SEQ ID NO: 33866 - DNA, 32 bp, Artificial; identical to SEQ ID NO: 11171
  oligonucleotide probe

SEQ ID NO: 33867 - DNA, 32 bp, Artificial; identical to SEQ ID NO: 13619
  oligonucleotide probe

SEQ ID NO: 33868 - DNA, 32 bp, Artificial; identical to SEQ ID NO: 13619
  oligonucleotide probe

SEQ ID NO: 33869 - DNA, 32 bp, Artificial; identical to SEQ ID NO: 11770
  oligonucleotide probe

SEQ ID NO: 33870 - DNA, 32 bp, Artificial; identical to SEQ ID NO: 11770
  oligonucleotide probe

SEQ ID NO: 33871 - DNA, 32 bp, Artificial; identical to SEQ ID NO: 11163
  oligonucleotide probe

SEQ ID NO: 33872 - DNA, 32 bp, Artificial; identical to SEQ ID NO: 11163
  oligonucleotide probe

SEQ ID NO: 33873 - DNA, 32 bp, Artificial; identical to SEQ ID NO: 11185
  oligonucleotide probe

SEQ ID NO: 33874 - DNA, 32 bp, Artificial; identical to SEQ ID NO: 11185
  oligonucleotide probe

SEQ ID NO: 33875 - DNA, 32 bp, Artificial; identical to SEQ ID NO: 11165
  oligonucleotide probe

SEQ ID NO: 33876 - DNA, 32 bp, Artificial; identical to SEQ ID NO: 11165
  oligonucleotide probe

SEQ ID NO: 33877 - DNA, 32 bp, Artificial; identical to SEQ ID NO: 13587
  oligonucleotide probe

SEQ ID NO: 33878 - DNA, 32 bp, Artificial; identical to SEQ ID NO: 13587
  oligonucleotide probe

SEQ ID NO: 33879 - DNA, 32 bp, Artificial; identical to SEQ ID NO: 11167
  oligonucleotide probe

SEQ ID NO: 33880 - DNA, 32 bp, Artificial; identical to SEQ ID NO: 11167
  oligonucleotide probe

SEQ ID NO: 33881 - DNA, 32 bp, Artificial; identical to SEQ ID NO: 11167
  oligonucleotide probe

SEQ ID NO: 33882 - DNA, 32 bp, Artificial; identical to SEQ ID NO: 11167
  oligonucleotide probe

SEQ ID NO: 33883 - DNA, 32 bp, Artificial; identical to SEQ ID NO: 11181
  oligonucleotide probe

SEQ ID NO: 33884 - DNA, 32 bp, Artificial; identical to SEQ ID NO: 11181
  oligonucleotide probe

SEQ ID NO: 33885 - DNA, 32 bp, Artificial; identical to SEQ ID NO: 11177
  oligonucleotide probe

SEQ ID NO: 33886 - DNA, 32 bp, Artificial; identical to SEQ ID NO: 11177
  oligonucleotide probe

SEQ ID NO: 33887 - DNA, 32 bp, Artificial; identical to SEQ ID NO: 11181
  oligonucleotide probe

SEQ ID NO: 33888 - DNA, 32 bp, Artificial; identical to SEQ ID NO: 11181
  oligonucleotide probe

SEQ ID NO: 33889 - DNA, 32 bp, Artificial; identical to SEQ ID NO: 13573
  oligonucleotide probe

SEQ ID NO: 33890 - DNA, 32 bp, Artificial; identical to SEQ ID NO: 13573
  oligonucleotide probe

SEQ ID NO: 33891 - DNA, 32 bp, Artificial; identical to SEQ ID NO: 11167
  oligonucleotide probe

SEQ ID NO: 33892 - DNA, 32 bp, Artificial; identical to SEQ ID NO: 11167
  oligonucleotide probe

SEQ ID NO: 33893 - DNA, 32 bp, Artificial; identical to SEQ ID NO: 11165
  oligonucleotide probe

SEQ ID NO: 33894 - DNA, 32 bp, Artificial; identical to SEQ ID NO: 11165
  oligonucleotide probe

SEQ ID NO: 33895 - DNA, 32 bp, Artificial; identical to SEQ ID NO: 11171
  oligonucleotide probe

SEQ ID NO: 33896 - DNA, 32 bp, Artificial; identical to SEQ ID NO: 11171
  oligonucleotide probe

SEQ ID NO: 33897 - DNA, 32 bp, Artificial; identical to SEQ ID NO: 13587
  oligonucleotide probe

SEQ ID NO: 33898 - DNA, 32 bp, Artificial; identical to SEQ ID NO: 13587
  oligonucleotide probe

SEQ ID NO: 33899 - DNA, 32 bp, Artificial; identical to SEQ ID NO: 13619
  oligonucleotide probe

SEQ ID NO: 33900 - DNA, 32 bp, Artificial; identical to SEQ ID NO: 13619
  oligonucleotide probe

SEQ ID NO: 33901 - DNA, 32 bp, Artificial; identical to SEQ ID NO: 11185
  oligonucleotide probe

SEQ ID NO: 33902 - DNA, 32 bp, Artificial; identical to SEQ ID NO: 11185
  oligonucleotide probe

SEQ ID NO: 33903 - DNA, 32 bp, Artificial; identical to SEQ ID NO: 11171
  oligonucleotide probe

SEQ ID NO: 33904 - DNA, 32 bp, Artificial; identical to SEQ ID NO: 11171
  oligonucleotide probe

SEQ ID NO: 33905 - DNA, 32 bp, Artificial; identical to SEQ ID NO: 11167
  oligonucleotide probe

SEQ ID NO: 33906 - DNA, 32 bp, Artificial; identical to SEQ ID NO: 11167
  oligonucleotide probe

SEQ ID NO: 33907 - DNA, 32 bp, Artificial; identical to SEQ ID NO: 13619
  oligonucleotide probe

SEQ ID NO: 33908 - DNA, 32 bp, Artificial; identical to SEQ ID NO: 13619
  oligonucleotide probe

SEQ ID NO: 33909 - DNA, 32 bp, Artificial; identical to SEQ ID NO: 11770
  oligonucleotide probe

SEQ ID NO: 33910 - DNA, 32 bp, Artificial; identical to SEQ ID NO: 11770
  oligonucleotide probe

SEQ ID NO: 33911 - DNA, 32 bp, Artificial; identical to SEQ ID NO: 11163
  oligonucleotide probe

SEQ ID NO: 33912 - DNA, 32 bp, Artificial; identical to SEQ ID NO: 11163
  oligonucleotide probe

SEQ ID NO: 33913 - DNA, 32 bp, Artificial; identical to SEQ ID NO: 11764
  oligonucleotide probe

SEQ ID NO: 33914 - DNA, 32 bp, Artificial; identical to SEQ ID NO: 11764
  oligonucleotide probe

SEQ ID NO: 33915 - DNA, 32 bp, Artificial; identical to SEQ ID NO: 11171
  oligonucleotide probe

SEQ ID NO: 33916 - DNA, 32 bp, Artificial; identical to SEQ ID NO: 11171
  oligonucleotide probe

SEQ ID NO: 33917 - DNA, 32 bp, Artificial; identical to SEQ ID NO: 13587
  oligonucleotide probe

SEQ ID NO: 33918 - DNA, 32 bp, Artificial; identical to SEQ ID NO: 13587
  oligonucleotide probe

SEQ ID NO: 33919 - DNA, 32 bp, Artificial; identical to SEQ ID NO: 13603
  oligonucleotide probe

SEQ ID NO: 33920 - DNA, 32 bp, Artificial; identical to SEQ ID NO: 13603
  oligonucleotide probe

SEQ ID NO: 33921 - DNA, 32 bp, Artificial; identical to SEQ ID NO: 13603
  oligonucleotide probe

SEQ ID NO: 33922 - DNA, 32 bp, Artificial; identical to SEQ ID NO: 13603
  oligonucleotide probe

SEQ ID NO: 33923 - DNA, 32 bp, Artificial; identical to SEQ ID NO: 11177
  oligonucleotide probe

SEQ ID NO: 33924 - DNA, 32 bp, Artificial; identical to SEQ ID NO: 11177
  oligonucleotide probe

SEQ ID NO: 33925 - DNA, 32 bp, Artificial; identical to SEQ ID NO: 13603
  oligonucleotide probe

SEQ ID NO: 33926 - DNA, 32 bp, Artificial; identical to SEQ ID NO: 13603
  oligonucleotide probe

SEQ ID NO: 33927 - DNA, 32 bp, Artificial; identical to SEQ ID NO: 11163
  oligonucleotide probe

SEQ ID NO: 33928 - DNA, 32 bp, Artificial; identical to SEQ ID NO: 11163
  oligonucleotide probe

SEQ ID NO: 33929 - DNA, 32 bp, Artificial; identical to SEQ ID NO: 11171
  oligonucleotide probe

SEQ ID NO: 33930 - DNA, 32 bp, Artificial; identical to SEQ ID NO: 11171
  oligonucleotide probe

SEQ ID NO: 33931 - DNA, 32 bp, Artificial; identical to SEQ ID NO: 11167
  oligonucleotide probe

SEQ ID NO: 33932 - DNA, 32 bp, Artificial; identical to SEQ ID NO: 11167
  oligonucleotide probe

SEQ ID NO: 33933 - DNA, 32 bp, Artificial; identical to SEQ ID NO: 11167
  oligonucleotide probe

SEQ ID NO: 33934 - DNA, 32 bp, Artificial; identical to SEQ ID NO: 11167
  oligonucleotide probe

SEQ ID NO: 33935 - DNA, 32 bp, Artificial; identical to SEQ ID NO: 11173
  oligonucleotide probe

SEQ ID NO: 33936 - DNA, 32 bp, Artificial; identical to SEQ ID NO: 11173
  oligonucleotide probe

SEQ ID NO: 33937 - DNA, 32 bp, Artificial; identical to SEQ ID NO: 11163
  oligonucleotide probe

SEQ ID NO: 33938 - DNA, 32 bp, Artificial; identical to SEQ ID NO: 11163
  oligonucleotide probe

SEQ ID NO: 33939 - DNA, 32 bp, Artificial; identical to SEQ ID NO: 11756
  oligonucleotide probe

SEQ ID NO: 33940 - DNA, 32 bp, Artificial; identical to SEQ ID NO: 11756
  oligonucleotide probe

SEQ ID NO: 33941 - DNA, 32 bp, Artificial; identical to SEQ ID NO: 11181
  oligonucleotide probe

SEQ ID NO: 33942 - DNA, 32 bp, Artificial; identical to SEQ ID NO: 11181
  oligonucleotide probe

SEQ ID NO: 33943 - DNA, 32 bp, Artificial; identical to SEQ ID NO: 13587
  oligonucleotide probe

SEQ ID NO: 33944 - DNA, 32 bp, Artificial; identical to SEQ ID NO: 13587
  oligonucleotide probe

SEQ ID NO: 33945 - DNA, 32 bp, Artificial; identical to SEQ ID NO: 11171
  oligonucleotide probe

SEQ ID NO: 33946 - DNA, 32 bp, Artificial; identical to SEQ ID NO: 11171
  oligonucleotide probe

SEQ ID NO: 33947 - DNA, 32 bp, Artificial; identical to SEQ ID NO: 11165
  oligonucleotide probe

SEQ ID NO: 33948 - DNA, 32 bp, Artificial; identical to SEQ ID NO: 11165
  oligonucleotide probe

SEQ ID NO: 33949 - DNA, 32 bp, Artificial; identical to SEQ ID NO: 11756
  oligonucleotide probe

SEQ ID NO: 33950 - DNA, 32 bp, Artificial; identical to SEQ ID NO: 11756
  oligonucleotide probe

SEQ ID NO: 33951 - DNA, 32 bp, Artificial; identical to SEQ ID NO: 13603
  oligonucleotide probe

SEQ ID NO: 33952 - DNA, 32 bp, Artificial; identical to SEQ ID NO: 13603
  oligonucleotide probe

SEQ ID NO: 33953 - DNA, 32 bp, Artificial; identical to SEQ ID NO: 11167
  oligonucleotide probe

SEQ ID NO: 33954 - DNA, 32 bp, Artificial; identical to SEQ ID NO: 11167
  oligonucleotide probe

SEQ ID NO: 33955 - DNA, 32 bp, Artificial; identical to SEQ ID NO: 11177
  oligonucleotide probe

SEQ ID NO: 33956 - DNA, 32 bp, Artificial; identical to SEQ ID NO: 11177
  oligonucleotide probe

SEQ ID NO: 33957 - DNA, 32 bp, Artificial; identical to SEQ ID NO: 11762
  oligonucleotide probe

SEQ ID NO: 33958 - DNA, 32 bp, Artificial; identical to SEQ ID NO: 11762
  oligonucleotide probe

SEQ ID NO: 33959 - DNA, 32 bp, Artificial; identical to SEQ ID NO: 13619
  oligonucleotide probe

SEQ ID NO: 33960 - DNA, 32 bp, Artificial; identical to SEQ ID NO: 13603
  oligonucleotide probe

SEQ ID NO: 33961 - DNA, 32 bp, Artificial; identical to SEQ ID NO: 13573
  oligonucleotide probe

SEQ ID NO: 33962 - DNA, 32 bp, Artificial; identical to SEQ ID NO: 13587
  oligonucleotide probe

SEQ ID NO: 33963 - DNA, 32 bp, Artificial; identical to SEQ ID NO: 5133
  oligonucleotide probe

SEQ ID NO: 33964 - DNA, 32 bp, Artificial; identical to SEQ ID NO: 5134
  oligonucleotide probe

SEQ ID NO: 33965 - DNA, 32 bp, Artificial; identical to SEQ ID NO: 5135
  oligonucleotide probe

SEQ ID NO: 33966 - DNA, 32 bp, Artificial; identical to SEQ ID NO: 5136
  oligonucleotide probe

SEQ ID NO: 33967 - DNA, 32 bp, Artificial; identical to SEQ ID NO: 5137
  oligonucleotide probe

SEQ ID NO: 33968 - DNA, 32 bp, Artificial; identical to SEQ ID NO: 5138
  oligonucleotide probe

SEQ ID NO: 33969 - DNA, 32 bp, Artificial; identical to SEQ ID NO: 5137
  oligonucleotide probe

SEQ ID NO: 33970 - DNA, 32 bp, Artificial; identical to SEQ ID NO: 5140
  oligonucleotide probe

SEQ ID NO: 33971 - DNA, 32 bp, Artificial; identical to SEQ ID NO: 5141
  oligonucleotide probe

SEQ ID NO: 33972 - DNA, 32 bp, Artificial; identical to SEQ ID NO: 5133
  oligonucleotide probe

SEQ ID NO: 33973 - DNA, 32 bp, Artificial; identical to SEQ ID NO: 5135
  oligonucleotide probe

SEQ ID NO: 33974 - DNA, 32 bp, Artificial; identical to SEQ ID NO: 5136
  oligonucleotide probe

SEQ ID NO: 33975 - DNA, 32 bp, Artificial; identical to SEQ ID NO: 5133
  oligonucleotide probe

SEQ ID NO: 33976 - DNA, 32 bp, Artificial; identical to SEQ ID NO: 5134
  oligonucleotide probe

SEQ ID NO: 33977 - DNA, 32 bp, Artificial; identical to SEQ ID NO: 5135
  oligonucleotide probe

SEQ ID NO: 33978 - DNA, 32 bp, Artificial; identical to SEQ ID NO: 5134
  oligonucleotide probe

SEQ ID NO: 33979 - DNA, 32 bp, Artificial; identical to SEQ ID NO: 5135
  oligonucleotide probe

SEQ ID NO: 33980 - DNA, 32 bp, Artificial; identical to SEQ ID NO: 5136
  oligonucleotide probe

SEQ ID NO: 33981 - DNA, 32 bp, Artificial; identical to SEQ ID NO: 5141
  oligonucleotide probe

SEQ ID NO: 33982 - DNA, 32 bp, Artificial; identical to SEQ ID NO: 5133
  oligonucleotide probe

SEQ ID NO: 33983 - DNA, 32 bp, Artificial; identical to SEQ ID NO: 5138
  oligonucleotide probe

SEQ ID NO: 33984 - DNA, 32 bp, Artificial; identical to SEQ ID NO: 5133
  oligonucleotide probe

SEQ ID NO: 33985 - DNA, 32 bp, Artificial; identical to SEQ ID NO: 5133
  oligonucleotide probe

SEQ ID NO: 33986 - DNA, 32 bp, Artificial; identical to SEQ ID NO: 5134
  oligonucleotide probe

SEQ ID NO: 33987 - DNA, 32 bp, Artificial; identical to SEQ ID NO: 5135
  oligonucleotide probe

SEQ ID NO: 33988 - DNA, 32 bp, Artificial; identical to SEQ ID NO: 5136
  oligonucleotide probe

SEQ ID NO: 33989 - DNA, 32 bp, Artificial; identical to SEQ ID NO: 5159
  oligonucleotide probe

SEQ ID NO: 33990 - DNA, 32 bp, Artificial; identical to SEQ ID NO: 5160
  oligonucleotide probe

SEQ ID NO: 33991 - DNA, 32 bp, Artificial; identical to SEQ ID NO: 5161
  oligonucleotide probe

SEQ ID NO: 33992 - DNA, 32 bp, Artificial; identical to SEQ ID NO: 5135
  oligonucleotide probe

SEQ ID NO: 33993 - DNA, 32 bp, Artificial; identical to SEQ ID NO: 5163
  oligonucleotide probe

SEQ ID NO: 33994 - DNA, 32 bp, Artificial; identical to SEQ ID NO: 5141
  oligonucleotide probe

SEQ ID NO: 33995 - DNA, 32 bp, Artificial; identical to SEQ ID NO: 5135
  oligonucleotide probe

SEQ ID NO: 33996 - DNA, 32 bp, Artificial; identical to SEQ ID NO: 5136
  oligonucleotide probe

SEQ ID NO: 33997 - DNA, 32 bp, Artificial; identical to SEQ ID NO: 5134
  oligonucleotide probe

SEQ ID NO: 33998 - DNA, 32 bp, Artificial; identical to SEQ ID NO: 5138
  oligonucleotide probe

SEQ ID NO: 33999 - DNA, 32 bp, Artificial; identical to SEQ ID NO: 5138
  oligonucleotide probe

SEQ ID NO: 34000 - DNA, 32 bp, Artificial; identical to SEQ ID NO: 5136
  oligonucleotide probe

SEQ ID NO: 34001 - DNA, 32 bp, Artificial; identical to SEQ ID NO: 5171
  oligonucleotide probe

SEQ ID NO: 34002 - DNA, 32 bp, Artificial; identical to SEQ ID NO: 5161
  oligonucleotide probe

SEQ ID NO: 34003 - DNA, 32 bp, Artificial; identical to SEQ ID NO: 5163
  oligonucleotide probe

SEQ ID NO: 34004 - DNA, 32 bp, Artificial; identical to SEQ ID NO: 5138
  oligonucleotide probe

SEQ ID NO: 34005 - DNA, 32 bp, Artificial; identical to SEQ ID NO: 5140
  oligonucleotide probe

SEQ ID NO: 34006 - DNA, 32 bp, Artificial; identical to SEQ ID NO: 5134
  oligonucleotide probe

SEQ ID NO: 34007 - DNA, 32 bp, Artificial; identical to SEQ ID NO: 5177
  oligonucleotide probe

SEQ ID NO: 34008 - DNA, 32 bp, Artificial; identical to SEQ ID NO: 5137
  oligonucleotide probe

SEQ ID NO: 34009 - DNA, 32 bp, Artificial; identical to SEQ ID NO: 5171
  oligonucleotide probe

SEQ ID NO: 34010 - DNA, 32 bp, Artificial; identical to SEQ ID NO: 5159
  oligonucleotide probe

SEQ ID NO: 34011 - DNA, 32 bp, Artificial; identical to SEQ ID NO: 5141
  oligonucleotide probe

SEQ ID NO: 34012 - DNA, 32 bp, Artificial; identical to SEQ ID NO: 5135
  oligonucleotide probe

SEQ ID NO: 34013 - DNA, 32 bp, Artificial; identical to SEQ ID NO: 5138
  oligonucleotide probe

SEQ ID NO: 34014 - DNA, 32 bp, Artificial; identical to SEQ ID NO: 5135
  oligonucleotide probe

SEQ ID NO: 34015 - DNA, 32 bp, Artificial; identical to SEQ ID NO: 5185
  oligonucleotide probe

SEQ ID NO: 34016 - DNA, 32 bp, Artificial; identical to SEQ ID NO: 5159
  oligonucleotide probe

SEQ ID NO: 34017 - DNA, 32 bp, Artificial; identical to SEQ ID NO: 5137
  oligonucleotide probe

SEQ ID NO: 34018 - DNA, 32 bp, Artificial; identical to SEQ ID NO: 5134
  oligonucleotide probe

SEQ ID NO: 34019 - DNA, 32 bp, Artificial; identical to SEQ ID NO: 5185
  oligonucleotide probe

SEQ ID NO: 34020 - DNA, 32 bp, Artificial; identical to SEQ ID NO: 5163
  oligonucleotide probe

SEQ ID NO: 34021 - DNA, 32 bp, Artificial; identical to SEQ ID NO: 5171
  oligonucleotide probe

SEQ ID NO: 34022 - DNA, 32 bp, Artificial; identical to SEQ ID NO: 5177
  oligonucleotide probe

SEQ ID NO: 34023 - DNA, 32 bp, Artificial; identical to SEQ ID NO: 5134
  oligonucleotide probe

SEQ ID NO: 34024 - DNA, 32 bp, Artificial; identical to SEQ ID NO: 5136
  oligonucleotide probe

SEQ ID NO: 34025 - DNA, 32 bp, Artificial; identical to SEQ ID NO: 5195
  oligonucleotide probe

SEQ ID NO: 34026 - DNA, 32 bp, Artificial; identical to SEQ ID NO: 5171
  oligonucleotide probe

SEQ ID NO: 34027 - DNA, 32 bp, Artificial; identical to SEQ ID NO: 5159
  oligonucleotide probe

SEQ ID NO: 34028 - DNA, 32 bp, Artificial; identical to SEQ ID NO: 5160
  oligonucleotide probe

SEQ ID NO: 34029 - DNA, 32 bp, Artificial; identical to SEQ ID NO: 5163
  oligonucleotide probe

SEQ ID NO: 34030 - DNA, 32 bp, Artificial; identical to SEQ ID NO: 5195
  oligonucleotide probe

SEQ ID NO: 34031 - DNA, 32 bp, Artificial; identical to SEQ ID NO: 5163
  oligonucleotide probe

SEQ ID NO: 34032 - DNA, 32 bp, Artificial; identical to SEQ ID NO: 5137
  oligonucleotide probe

SEQ ID NO: 34033 - DNA, 32 bp, Artificial; identical to SEQ ID NO: 5195
  oligonucleotide probe

SEQ ID NO: 34034 - DNA, 32 bp, Artificial; identical to SEQ ID NO: 5141
  oligonucleotide probe

SEQ ID NO: 34035 - DNA, 32 bp, Artificial; identical to SEQ ID NO: 5141
  oligonucleotide probe

SEQ ID NO: 34036 - DNA, 32 bp, Artificial; identical to SEQ ID NO: 5133
  oligonucleotide probe

SEQ ID NO: 34037 - DNA, 32 bp, Artificial; identical to SEQ ID NO: 5161
  oligonucleotide probe

SEQ ID NO: 34038 - DNA, 32 bp, Artificial; identical to SEQ ID NO: 5138
  oligonucleotide probe

SEQ ID NO: 34039 - DNA, 32 bp, Artificial; identical to SEQ ID NO: 5195
  oligonucleotide probe

SEQ ID NO: 34040 - DNA, 32 bp, Artificial; identical to SEQ ID NO: 5140
  oligonucleotide probe

SEQ ID NO: 34041 - DNA, 32 bp, Artificial; identical to SEQ ID NO: 5159
  oligonucleotide probe

SEQ ID NO: 34042 - DNA, 32 bp, Artificial; identical to SEQ ID NO: 5141
  oligonucleotide probe

SEQ ID NO: 34043 - DNA, 32 bp, Artificial; identical to SEQ ID NO: 5137
  oligonucleotide probe

SEQ ID NO: 34044 - DNA, 32 bp, Artificial; identical to SEQ ID NO: 5133
  oligonucleotide probe

SEQ ID NO: 34045 - DNA, 32 bp, Artificial; identical to SEQ ID NO: 5160
  oligonucleotide probe

SEQ ID NO: 34046 - DNA, 32 bp, Artificial; identical to SEQ ID NO: 5134
  oligonucleotide probe

SEQ ID NO: 34047 - DNA, 32 bp, Artificial; identical to SEQ ID NO: 5217
  oligonucleotide probe

SEQ ID NO: 34048 - DNA, 32 bp, Artificial; identical to SEQ ID NO: 5218
  oligonucleotide probe

SEQ ID NO: 34049 - DNA, 32 bp, Artificial; identical to SEQ ID NO: 5219
  oligonucleotide probe

SEQ ID NO: 34050 - DNA, 32 bp, Artificial; identical to SEQ ID NO: 5220
  oligonucleotide probe

SEQ ID NO: 34051 - DNA, 32 bp, Artificial; identical to SEQ ID NO: 5221
  oligonucleotide probe

SEQ ID NO: 34052 - DNA, 32 bp, Artificial; identical to SEQ ID NO: 5222
  oligonucleotide probe

SEQ ID NO: 34053 - DNA, 32 bp, Artificial; identical to SEQ ID NO: 5223
  oligonucleotide probe

SEQ ID NO: 34054 - DNA, 32 bp, Artificial; identical to SEQ ID NO: 5224
  oligonucleotide probe

SEQ ID NO: 34055 - DNA, 32 bp, Artificial; identical to SEQ ID NO: 5219
  oligonucleotide probe

SEQ ID NO: 34056 - DNA, 32 bp, Artificial; identical to SEQ ID NO: 5220
  oligonucleotide probe

SEQ ID NO: 34057 - DNA, 32 bp, Artificial; identical to SEQ ID NO: 5219
  oligonucleotide probe

SEQ ID NO: 34058 - DNA, 32 bp, Artificial; identical to SEQ ID NO: 5220
  oligonucleotide probe

SEQ ID NO: 34059 - DNA, 32 bp, Artificial; identical to SEQ ID NO: 5229
  oligonucleotide probe

SEQ ID NO: 34060 - DNA, 32 bp, Artificial; identical to SEQ ID NO: 5221
  oligonucleotide probe

SEQ ID NO: 34061 - DNA, 32 bp, Artificial; identical to SEQ ID NO: 5231
  oligonucleotide probe

SEQ ID NO: 34062 - DNA, 32 bp, Artificial; identical to SEQ ID NO: 5232
  oligonucleotide probe

SEQ ID NO: 34063 - DNA, 32 bp, Artificial; identical to SEQ ID NO: 5229
  oligonucleotide probe

SEQ ID NO: 34064 - DNA, 32 bp, Artificial; identical to SEQ ID NO: 5221
  oligonucleotide probe

SEQ ID NO: 34065 - DNA, 32 bp, Artificial; identical to SEQ ID NO: 5219
  oligonucleotide probe

SEQ ID NO: 34066 - DNA, 32 bp, Artificial; identical to SEQ ID NO: 5220
  oligonucleotide probe

SEQ ID NO: 34067 - DNA, 32 bp, Artificial; identical to SEQ ID NO: 5217
  oligonucleotide probe

SEQ ID NO: 34068 - DNA, 32 bp, Artificial; identical to SEQ ID NO: 5218
  oligonucleotide probe

SEQ ID NO: 34069 - DNA, 32 bp, Artificial; identical to SEQ ID NO: 5239
  oligonucleotide probe

SEQ ID NO: 34070 - DNA, 32 bp, Artificial; identical to SEQ ID NO: 5240
  oligonucleotide probe

SEQ ID NO: 34071 - DNA, 32 bp, Artificial; identical to SEQ ID NO: 5241
  oligonucleotide probe

SEQ ID NO: 34072 - DNA, 32 bp, Artificial; identical to SEQ ID NO: 5242
  oligonucleotide probe

SEQ ID NO: 34073 - DNA, 32 bp, Artificial; identical to SEQ ID NO: 5223
  oligonucleotide probe

SEQ ID NO: 34074 - DNA, 32 bp, Artificial; identical to SEQ ID NO: 5224
  oligonucleotide probe

SEQ ID NO: 34075 - DNA, 32 bp, Artificial; identical to SEQ ID NO: 5217
  oligonucleotide probe

SEQ ID NO: 34076 - DNA, 32 bp, Artificial; identical to SEQ ID NO: 5218
  oligonucleotide probe

SEQ ID NO: 34077 - DNA, 32 bp, Artificial; identical to SEQ ID NO: 5219
  oligonucleotide probe

SEQ ID NO: 34078 - DNA, 32 bp, Artificial; identical to SEQ ID NO: 5220
  oligonucleotide probe

SEQ ID NO: 34079 - DNA, 32 bp, Artificial; identical to SEQ ID NO: 5217
  oligonucleotide probe

SEQ ID NO: 34080 - DNA, 32 bp, Artificial; identical to SEQ ID NO: 5218
  oligonucleotide probe

SEQ ID NO: 34081 - DNA, 32 bp, Artificial; identical to SEQ ID NO: 5239
  oligonucleotide probe

SEQ ID NO: 34082 - DNA, 32 bp, Artificial; identical to SEQ ID NO: 5240
  oligonucleotide probe

SEQ ID NO: 34083 - DNA, 32 bp, Artificial; identical to SEQ ID NO: 5253
  oligonucleotide probe

SEQ ID NO: 34084 - DNA, 32 bp, Artificial; identical to SEQ ID NO: 5222
  oligonucleotide probe

SEQ ID NO: 34085 - DNA, 32 bp, Artificial; identical to SEQ ID NO: 5223
  oligonucleotide probe

SEQ ID NO: 34086 - DNA, 32 bp, Artificial; identical to SEQ ID NO: 5224
  oligonucleotide probe

SEQ ID NO: 34087 - DNA, 32 bp, Artificial; identical to SEQ ID NO: 5219
  oligonucleotide probe

SEQ ID NO: 34088 - DNA, 32 bp, Artificial; identical to SEQ ID NO: 5220
  oligonucleotide probe

SEQ ID NO: 34089 - DNA, 32 bp, Artificial; identical to SEQ ID NO: 5223
  oligonucleotide probe

SEQ ID NO: 34090 - DNA, 32 bp, Artificial; identical to SEQ ID NO: 5224
  oligonucleotide probe

SEQ ID NO: 34091 - DNA, 32 bp, Artificial; identical to SEQ ID NO: 5223
  oligonucleotide probe

SEQ ID NO: 34092 - DNA, 32 bp, Artificial; identical to SEQ ID NO: 5224
  oligonucleotide probe

SEQ ID NO: 34093 - DNA, 32 bp, Artificial; identical to SEQ ID NO: 5219
  oligonucleotide probe

SEQ ID NO: 34094 - DNA, 32 bp, Artificial; identical to SEQ ID NO: 5220
  oligonucleotide probe

SEQ ID NO: 34095 - DNA, 32 bp, Artificial; identical to SEQ ID NO: 5218
  oligonucleotide probe

SEQ ID NO: 34096 - DNA, 32 bp, Artificial; identical to SEQ ID NO: 5224
  oligonucleotide probe

SEQ ID NO: 34097 - DNA, 32 bp, Artificial; identical to SEQ ID NO: 5223
  oligonucleotide probe

SEQ ID NO: 34098 - DNA, 32 bp, Artificial; identical to SEQ ID NO: 5224
  oligonucleotide probe

SEQ ID NO: 34099 - DNA, 32 bp, Artificial; identical to SEQ ID NO: 5219
  oligonucleotide probe

SEQ ID NO: 34100 - DNA, 32 bp, Artificial; identical to SEQ ID NO: 5220
  oligonucleotide probe

SEQ ID NO: 34101 - DNA, 32 bp, Artificial; identical to SEQ ID NO: 5231
  oligonucleotide probe

SEQ ID NO: 34102 - DNA, 32 bp, Artificial; identical to SEQ ID NO: 5232
  oligonucleotide probe

SEQ ID NO: 34103 - DNA, 32 bp, Artificial; identical to SEQ ID NO: 5253
  oligonucleotide probe

SEQ ID NO: 34104 - DNA, 32 bp, Artificial; identical to SEQ ID NO: 5222
  oligonucleotide probe

SEQ ID NO: 34105 - DNA, 32 bp, Artificial; identical to SEQ ID NO: 5218
  oligonucleotide probe

SEQ ID NO: 34106 - DNA, 32 bp, Artificial; identical to SEQ ID NO: 5224
  oligonucleotide probe

SEQ ID NO: 34107 - DNA, 32 bp, Artificial; identical to SEQ ID NO: 5223
  oligonucleotide probe

SEQ ID NO: 34108 - DNA, 32 bp, Artificial; identical to SEQ ID NO: 5224
  oligonucleotide probe

SEQ ID NO: 34109 - DNA, 32 bp, Artificial; identical to SEQ ID NO: 5219
  oligonucleotide probe

SEQ ID NO: 34110 - DNA, 32 bp, Artificial; identical to SEQ ID NO: 5220
  oligonucleotide probe

SEQ ID NO: 34111 - DNA, 32 bp, Artificial; identical to SEQ ID NO: 5253
  oligonucleotide probe

SEQ ID NO: 34112 - DNA, 32 bp, Artificial; identical to SEQ ID NO: 5222
  oligonucleotide probe

SEQ ID NO: 34113 - DNA, 32 bp, Artificial; identical to SEQ ID NO: 5253
  oligonucleotide probe

SEQ ID NO: 34114 - DNA, 32 bp, Artificial; identical to SEQ ID NO: 5222
  oligonucleotide probe

SEQ ID NO: 34115 - DNA, 32 bp, Artificial; identical to SEQ ID NO: 5253
  oligonucleotide probe

SEQ ID NO: 34116 - DNA, 32 bp, Artificial; identical to SEQ ID NO: 5222
  oligonucleotide probe

SEQ ID NO: 34117 - DNA, 32 bp, Artificial; identical to SEQ ID NO: 5219
  oligonucleotide probe

SEQ ID NO: 34118 - DNA, 32 bp, Artificial; identical to SEQ ID NO: 5220
  oligonucleotide probe

SEQ ID NO: 34119 - DNA, 32 bp, Artificial; identical to SEQ ID NO: 5253
  oligonucleotide probe

SEQ ID NO: 34120 - DNA, 32 bp, Artificial; identical to SEQ ID NO: 5222
  oligonucleotide probe

SEQ ID NO: 34121 - DNA, 32 bp, Artificial; identical to SEQ ID NO: 5229
  oligonucleotide probe

SEQ ID NO: 34122 - DNA, 32 bp, Artificial; identical to SEQ ID NO: 5221
  oligonucleotide probe

SEQ ID NO: 34123 - DNA, 32 bp, Artificial; identical to SEQ ID NO: 5229
  oligonucleotide probe

SEQ ID NO: 34124 - DNA, 32 bp, Artificial; identical to SEQ ID NO: 5221
  oligonucleotide probe

SEQ ID NO: 34125 - DNA, 32 bp, Artificial; identical to SEQ ID NO: 5219
  oligonucleotide probe

SEQ ID NO: 34126 - DNA, 32 bp, Artificial; identical to SEQ ID NO: 5220
  oligonucleotide probe

SEQ ID NO: 34127 - DNA, 32 bp, Artificial; identical to SEQ ID NO: 5229
  oligonucleotide probe

SEQ ID NO: 34128 - DNA, 32 bp, Artificial; identical to SEQ ID NO: 5221
  oligonucleotide probe

SEQ ID NO: 34129 - DNA, 32 bp, Artificial; identical to SEQ ID NO: 5217
  oligonucleotide probe

SEQ ID NO: 34130 - DNA, 32 bp, Artificial; identical to SEQ ID NO: 5218
  oligonucleotide probe

SEQ ID NO: 34131 - DNA, 32 bp, Artificial; identical to SEQ ID NO: 5229
  oligonucleotide probe

SEQ ID NO: 34132 - DNA, 32 bp, Artificial; identical to SEQ ID NO: 5221
  oligonucleotide probe

SEQ ID NO: 34133 - DNA, 32 bp, Artificial; identical to SEQ ID NO: 5219
  oligonucleotide probe

SEQ ID NO: 34134 - DNA, 32 bp, Artificial; identical to SEQ ID NO: 5220
  oligonucleotide probe

SEQ ID NO: 34135 - DNA, 32 bp, Artificial; identical to SEQ ID NO: 5219
  oligonucleotide probe

SEQ ID NO: 34136 - DNA, 32 bp, Artificial; identical to SEQ ID NO: 5220
  oligonucleotide probe

SEQ ID NO: 34137 - DNA, 32 bp, Artificial; identical to SEQ ID NO: 5219
  oligonucleotide probe

SEQ ID NO: 34138 - DNA, 32 bp, Artificial; identical to SEQ ID NO: 5220
  oligonucleotide probe

SEQ ID NO: 34139 - DNA, 32 bp, Artificial; identical to SEQ ID NO: 5223
  oligonucleotide probe

SEQ ID NO: 34140 - DNA, 32 bp, Artificial; identical to SEQ ID NO: 5224
  oligonucleotide probe

SEQ ID NO: 34141 - DNA, 32 bp, Artificial; identical to SEQ ID NO: 5217
  oligonucleotide probe

SEQ ID NO: 34142 - DNA, 32 bp, Artificial; identical to SEQ ID NO: 5218
  oligonucleotide probe

SEQ ID NO: 34143 - DNA, 32 bp, Artificial; identical to SEQ ID NO: 5239
  oligonucleotide probe

SEQ ID NO: 34144 - DNA, 32 bp, Artificial; identical to SEQ ID NO: 5240
  oligonucleotide probe

SEQ ID NO: 34145 - DNA, 32 bp, Artificial; identical to SEQ ID NO: 5219
  oligonucleotide probe

SEQ ID NO: 34146 - DNA, 32 bp, Artificial; identical to SEQ ID NO: 5220
  oligonucleotide probe

SEQ ID NO: 34147 - DNA, 32 bp, Artificial; identical to SEQ ID NO: 5221
  oligonucleotide probe

SEQ ID NO: 34148 - DNA, 32 bp, Artificial; identical to SEQ ID NO: 5222
  oligonucleotide probe

SEQ ID NO: 34149 - DNA, 32 bp, Artificial; identical to SEQ ID NO: 5231
  oligonucleotide probe

SEQ ID NO: 34150 - DNA, 32 bp, Artificial; identical to SEQ ID NO: 5232
  oligonucleotide probe

SEQ ID NO: 34151 - DNA, 32 bp, Artificial; identical to SEQ ID NO: 5218
  oligonucleotide probe

SEQ ID NO: 34152 - DNA, 32 bp, Artificial; identical to SEQ ID NO: 5224
  oligonucleotide probe

SEQ ID NO: 34153 - DNA, 32 bp, Artificial; identical to SEQ ID NO: 5219
  oligonucleotide probe

SEQ ID NO: 34154 - DNA, 32 bp, Artificial; identical to SEQ ID NO: 5220
  oligonucleotide probe

SEQ ID NO: 34155 - DNA, 32 bp, Artificial; identical to SEQ ID NO: 5253
  oligonucleotide probe

SEQ ID NO: 34156 - DNA, 32 bp, Artificial; identical to SEQ ID NO: 5222
  oligonucleotide probe

SEQ ID NO: 34157 - DNA, 32 bp, Artificial; identical to SEQ ID NO: 5223
  oligonucleotide probe

SEQ ID NO: 34158 - DNA, 32 bp, Artificial; identical to SEQ ID NO: 5224
  oligonucleotide probe

SEQ ID NO: 34159 - DNA, 32 bp, Artificial; identical to SEQ ID NO: 5217
  oligonucleotide probe

SEQ ID NO: 34160 - DNA, 32 bp, Artificial; identical to SEQ ID NO: 5218
  oligonucleotide probe

SEQ ID NO: 34161 - DNA, 32 bp, Artificial; identical to SEQ ID NO: 5241
  oligonucleotide probe

SEQ ID NO: 34162 - DNA, 32 bp, Artificial; identical to SEQ ID NO: 5242
  oligonucleotide probe

SEQ ID NO: 34163 - DNA, 32 bp, Artificial; identical to SEQ ID NO: 5253
  oligonucleotide probe

SEQ ID NO: 34164 - DNA, 32 bp, Artificial; identical to SEQ ID NO: 5222
  oligonucleotide probe

SEQ ID NO: 34165 - DNA, 32 bp, Artificial; identical to SEQ ID NO: 5217
  oligonucleotide probe

SEQ ID NO: 34166 - DNA, 32 bp, Artificial; identical to SEQ ID NO: 5218
  oligonucleotide probe

SEQ ID NO: 34167 - DNA, 32 bp, Artificial; identical to SEQ ID NO: 5253
  oligonucleotide probe

SEQ ID NO: 34168 - DNA, 32 bp, Artificial; identical to SEQ ID NO: 5222
  oligonucleotide probe

SEQ ID NO: 34169 - DNA, 32 bp, Artificial; identical to SEQ ID NO: 5217
  oligonucleotide probe

SEQ ID NO: 34170 - DNA, 32 bp, Artificial; identical to SEQ ID NO: 5218
  oligonucleotide probe

SEQ ID NO: 34171 - DNA, 32 bp, Artificial; identical to SEQ ID NO: 5217
  oligonucleotide probe

SEQ ID NO: 34172 - DNA, 32 bp, Artificial; identical to SEQ ID NO: 5218
  oligonucleotide probe

SEQ ID NO: 34173 - DNA, 32 bp, Artificial; identical to SEQ ID NO: 5231
  oligonucleotide probe

SEQ ID NO: 34174 - DNA, 32 bp, Artificial; identical to SEQ ID NO: 5232
  oligonucleotide probe

SEQ ID NO: 34175 - DNA, 32 bp, Artificial; identical to SEQ ID NO: 5231
  oligonucleotide probe

SEQ ID NO: 34176 - DNA, 32 bp, Artificial; identical to SEQ ID NO: 5232
  oligonucleotide probe

SEQ ID NO: 34177 - DNA, 32 bp, Artificial; identical to SEQ ID NO: 5231
  oligonucleotide probe

SEQ ID NO: 34178 - DNA, 32 bp, Artificial; identical to SEQ ID NO: 5232
  oligonucleotide probe

SEQ ID NO: 34179 - DNA, 32 bp, Artificial; identical to SEQ ID NO: 5223
  oligonucleotide probe

SEQ ID NO: 34180 - DNA, 32 bp, Artificial; identical to SEQ ID NO: 5224
  oligonucleotide probe

SEQ ID NO: 34181 - DNA, 32 bp, Artificial; identical to SEQ ID NO: 5219
  oligonucleotide probe

SEQ ID NO: 34182 - DNA, 32 bp, Artificial; identical to SEQ ID NO: 5220
  oligonucleotide probe

SEQ ID NO: 34183 - DNA, 32 bp, Artificial; identical to SEQ ID NO: 5229
  oligonucleotide probe

SEQ ID NO: 34184 - DNA, 32 bp, Artificial; identical to SEQ ID NO: 5221
  oligonucleotide probe

SEQ ID NO: 34185 - DNA, 32 bp, Artificial; identical to SEQ ID NO: 5223
  oligonucleotide probe

SEQ ID NO: 34186 - DNA, 32 bp, Artificial; identical to SEQ ID NO: 5224
  oligonucleotide probe

SEQ ID NO: 34187 - DNA, 32 bp, Artificial; identical to SEQ ID NO: 5223
  oligonucleotide probe

SEQ ID NO: 34188 - DNA, 32 bp, Artificial; identical to SEQ ID NO: 5224
  oligonucleotide probe

SEQ ID NO: 34189 - DNA, 32 bp, Artificial; identical to SEQ ID NO: 5223
  oligonucleotide probe

SEQ ID NO: 34190 - DNA, 32 bp, Artificial; identical to SEQ ID NO: 5224
  oligonucleotide probe

SEQ ID NO: 34191 - DNA, 32 bp, Artificial; identical to SEQ ID NO: 5231
  oligonucleotide probe

SEQ ID NO: 34192 - DNA, 32 bp, Artificial; identical to SEQ ID NO: 5232
  oligonucleotide probe

SEQ ID NO: 34193 - DNA, 32 bp, Artificial; identical to SEQ ID NO: 5223
  oligonucleotide probe

SEQ ID NO: 34194 - DNA, 32 bp, Artificial; identical to SEQ ID NO: 5224
  oligonucleotide probe

SEQ ID NO: 34195 - DNA, 32 bp, Artificial; identical to SEQ ID NO: 5239
  oligonucleotide probe

SEQ ID NO: 34196 - DNA, 32 bp, Artificial; identical to SEQ ID NO: 5240
  oligonucleotide probe

SEQ ID NO: 34197 - DNA, 32 bp, Artificial; identical to SEQ ID NO: 5219
  oligonucleotide probe

SEQ ID NO: 34198 - DNA, 32 bp, Artificial; identical to SEQ ID NO: 5220
  oligonucleotide probe

SEQ ID NO: 34199 - DNA, 32 bp, Artificial; identical to SEQ ID NO: 5223
  oligonucleotide probe

SEQ ID NO: 34200 - DNA, 32 bp, Artificial; identical to SEQ ID NO: 5224
  oligonucleotide probe

SEQ ID NO: 34201 - DNA, 32 bp, Artificial; identical to SEQ ID NO: 5223
  oligonucleotide probe

SEQ ID NO: 34202 - DNA, 32 bp, Artificial; identical to SEQ ID NO: 5224
  oligonucleotide probe

SEQ ID NO: 34203 - DNA, 32 bp, Artificial; identical to SEQ ID NO: 5219
  oligonucleotide probe

SEQ ID NO: 34204 - DNA, 32 bp, Artificial; identical to SEQ ID NO: 5220
  oligonucleotide probe

SEQ ID NO: 34205 - DNA, 32 bp, Artificial; identical to SEQ ID NO: 5241
  oligonucleotide probe

SEQ ID NO: 34206 - DNA, 32 bp, Artificial; identical to SEQ ID NO: 5242
  oligonucleotide probe

SEQ ID NO: 34207 - DNA, 32 bp, Artificial; identical to SEQ ID NO: 5231
  oligonucleotide probe

SEQ ID NO: 34208 - DNA, 32 bp, Artificial; identical to SEQ ID NO: 5232
  oligonucleotide probe

SEQ ID NO: 34209 - DNA, 32 bp, Artificial; identical to SEQ ID NO: 5219
  oligonucleotide probe

SEQ ID NO: 34210 - DNA, 32 bp, Artificial; identical to SEQ ID NO: 5220
  oligonucleotide probe

SEQ ID NO: 34211 - DNA, 32 bp, Artificial; identical to SEQ ID NO: 5253
  oligonucleotide probe

SEQ ID NO: 34212 - DNA, 32 bp, Artificial; identical to SEQ ID NO: 5222
  oligonucleotide probe

SEQ ID NO: 34213 - DNA, 32 bp, Artificial; identical to SEQ ID NO: 5229
  oligonucleotide probe

SEQ ID NO: 34214 - DNA, 32 bp, Artificial; identical to SEQ ID NO: 5221
  oligonucleotide probe

SEQ ID NO: 34215 - DNA, 32 bp, Artificial; identical to SEQ ID NO: 5253
  oligonucleotide probe

SEQ ID NO: 34216 - DNA, 32 bp, Artificial; identical to SEQ ID NO: 5222
  oligonucleotide probe

SEQ ID NO: 34217 - DNA, 32 bp, Artificial; identical to SEQ ID NO: 5253
  oligonucleotide probe

SEQ ID NO: 34218 - DNA, 32 bp, Artificial; identical to SEQ ID NO: 5222
  oligonucleotide probe

SEQ ID NO: 34219 - DNA, 32 bp, Artificial; identical to SEQ ID NO: 5217
  oligonucleotide probe

SEQ ID NO: 34220 - DNA, 32 bp, Artificial; identical to SEQ ID NO: 5218
  oligonucleotide probe

SEQ ID NO: 34221 - DNA, 32 bp, Artificial; identical to SEQ ID NO: 5217
  oligonucleotide probe

SEQ ID NO: 34222 - DNA, 32 bp, Artificial; identical to SEQ ID NO: 5218
  oligonucleotide probe

SEQ ID NO: 34223 - DNA, 32 bp, Artificial; identical to SEQ ID NO: 5241
  oligonucleotide probe

SEQ ID NO: 34224 - DNA, 32 bp, Artificial; identical to SEQ ID NO: 5242
  oligonucleotide probe

SEQ ID NO: 34225 - DNA, 32 bp, Artificial; identical to SEQ ID NO: 5240
  oligonucleotide probe

SEQ ID NO: 34226 - DNA, 32 bp, Artificial; identical to SEQ ID NO: 5232
  oligonucleotide probe

SEQ ID NO: 34227 - DNA, 32 bp, Artificial; identical to SEQ ID NO: 5232
  oligonucleotide probe

SEQ ID NO: 34228 - DNA, 32 bp, Artificial; identical to SEQ ID NO: 5218
  oligonucleotide probe

SEQ ID NO: 34229 - DNA, 32 bp, Artificial; identical to SEQ ID NO: 5399
  oligonucleotide probe

SEQ ID NO: 34230 - DNA, 32 bp, Artificial; identical to SEQ ID NO: 5240
  oligonucleotide probe

SEQ ID NO: 34231 - DNA, 32 bp, Artificial; identical to SEQ ID NO: 5242
  oligonucleotide probe

SEQ ID NO: 34232 - DNA, 32 bp, Artificial; identical to SEQ ID NO: 5222
  oligonucleotide probe

SEQ ID NO: 34233 - DNA, 32 bp, Artificial; identical to SEQ ID NO: 5232
  oligonucleotide probe

SEQ ID NO: 34234 - DNA, 32 bp, Artificial; identical to SEQ ID NO: 5220
  oligonucleotide probe

SEQ ID NO: 34235 - DNA, 32 bp, Artificial; identical to SEQ ID NO: 5224
  oligonucleotide probe

SEQ ID NO: 34236 - DNA, 32 bp, Artificial; identical to SEQ ID NO: 5161
  oligonucleotide probe

SEQ ID NO: 34237 - DNA, 32 bp, Artificial; identical to SEQ ID NO: 5138
  oligonucleotide probe

SEQ ID NO: 34238 - DNA, 32 bp, Artificial; identical to SEQ ID NO: 5160
  oligonucleotide probe

SEQ ID NO: 34239 - DNA, 32 bp, Artificial; identical to SEQ ID NO: 5140
  oligonucleotide probe

SEQ ID NO: 34240 - DNA, 32 bp, Artificial; identical to SEQ ID NO: 5410
  oligonucleotide probe

SEQ ID NO: 34241 - DNA, 32 bp, Artificial; identical to SEQ ID NO: 5411
  oligonucleotide probe

SEQ ID NO: 34242 - DNA, 32 bp, Artificial; identical to SEQ ID NO: 5231
  oligonucleotide probe

SEQ ID NO: 34243 - DNA, 32 bp, Artificial; identical to SEQ ID NO: 5232
  oligonucleotide probe

SEQ ID NO: 34244 - DNA, 32 bp, Artificial; identical to SEQ ID NO: 5240
  oligonucleotide probe

SEQ ID NO: 34245 - DNA, 32 bp, Artificial; identical to SEQ ID NO: 5232
  oligonucleotide probe

SEQ ID NO: 34246 - DNA, 32 bp, Artificial; identical to SEQ ID NO: 5416
  oligonucleotide probe

SEQ ID NO: 34247 - DNA, 32 bp, Artificial; identical to SEQ ID NO: 5399
  oligonucleotide probe

SEQ ID NO: 34248 - DNA, 32 bp, Artificial; identical to SEQ ID NO: 5177
  oligonucleotide probe

SEQ ID NO: 34249 - DNA, 32 bp, Artificial; identical to SEQ ID NO: 5137
  oligonucleotide probe

SEQ ID NO: 34250 - DNA, 32 bp, Artificial; identical to SEQ ID NO: 5217
  oligonucleotide probe

SEQ ID NO: 34251 - DNA, 32 bp, Artificial; identical to SEQ ID NO: 5218
  oligonucleotide probe

SEQ ID NO: 34252 - DNA, 32 bp, Artificial; identical to SEQ ID NO: 5159
  oligonucleotide probe

SEQ ID NO: 34253 - DNA, 32 bp, Artificial; identical to SEQ ID NO: 5141
  oligonucleotide probe

SEQ ID NO: 34254 - DNA, 32 bp, Artificial; identical to SEQ ID NO: 5410
  oligonucleotide probe

SEQ ID NO: 34255 - DNA, 32 bp, Artificial; identical to SEQ ID NO: 5411
  oligonucleotide probe

SEQ ID NO: 34256 - DNA, 32 bp, Artificial; identical to SEQ ID NO: 5217
  oligonucleotide probe

SEQ ID NO: 34257 - DNA, 32 bp, Artificial; identical to SEQ ID NO: 5223
  oligonucleotide probe

SEQ ID NO: 34258 - DNA, 32 bp, Artificial; identical to SEQ ID NO: 5185
  oligonucleotide probe

SEQ ID NO: 34259 - DNA, 32 bp, Artificial; identical to SEQ ID NO: 5163
  oligonucleotide probe

SEQ ID NO: 34260 - DNA, 32 bp, Artificial; identical to SEQ ID NO: 5195
  oligonucleotide probe

SEQ ID NO: 34261 - DNA, 32 bp, Artificial; identical to SEQ ID NO: 5240
  oligonucleotide probe

SEQ ID NO: 34262 - DNA, 32 bp, Artificial; identical to SEQ ID NO: 5140
  oligonucleotide probe

SEQ ID NO: 34263 - DNA, 32 bp, Artificial; identical to SEQ ID NO: 5134
  oligonucleotide probe

SEQ ID NO: 34264 - DNA, 32 bp, Artificial; identical to SEQ ID NO: 5229
  oligonucleotide probe

SEQ ID NO: 34265 - DNA, 32 bp, Artificial; identical to SEQ ID NO: 5221
  oligonucleotide probe

SEQ ID NO: 34266 - DNA, 32 bp, Artificial; identical to SEQ ID NO: 5133
  oligonucleotide probe

SEQ ID NO: 34267 - DNA, 32 bp, Artificial; identical to SEQ ID NO: 5221
  oligonucleotide probe

SEQ ID NO: 34268 - DNA, 32 bp, Artificial; identical to SEQ ID NO: 5135
  oligonucleotide probe

SEQ ID NO: 34269 - DNA, 32 bp, Artificial; identical to SEQ ID NO: 5218
  oligonucleotide probe

SEQ ID NO: 34270 - DNA, 32 bp, Artificial; identical to SEQ ID NO: 5410
  oligonucleotide probe

SEQ ID NO: 34271 - DNA, 32 bp, Artificial; identical to SEQ ID NO: 5241
  oligonucleotide probe

SEQ ID NO: 34272 - DNA, 32 bp, Artificial; identical to SEQ ID NO: 5134
  oligonucleotide probe

SEQ ID NO: 34273 - DNA, 32 bp, Artificial; identical to SEQ ID NO: 5136
  oligonucleotide probe

SEQ ID NO: 34274 - DNA, 32 bp, Artificial; identical to SEQ ID NO: 5218
  oligonucleotide probe

SEQ ID NO: 34275 - DNA, 32 bp, Artificial; identical to SEQ ID NO: 5224
  oligonucleotide probe

SEQ ID NO: 34276 - DNA, 32 bp, Artificial; identical to SEQ ID NO: 5242
  oligonucleotide probe

SEQ ID NO: 34277 - DNA, 32 bp, Artificial; identical to SEQ ID NO: 5221
  oligonucleotide probe

SEQ ID NO: 34278 - DNA, 32 bp, Artificial; identical to SEQ ID NO: 5231
  oligonucleotide probe

SEQ ID NO: 34279 - DNA, 32 bp, Artificial; identical to SEQ ID NO: 5232
  oligonucleotide probe

SEQ ID NO: 34280 - DNA, 32 bp, Artificial; identical to SEQ ID NO: 5221
  oligonucleotide probe

SEQ ID NO: 34281 - DNA, 32 bp, Artificial; identical to SEQ ID NO: 5222
  oligonucleotide probe

SEQ ID NO: 34282 - DNA, 32 bp, Artificial; identical to SEQ ID NO: 5222
  oligonucleotide probe

SEQ ID NO: 34283 - DNA, 32 bp, Artificial; identical to SEQ ID NO: 5219
  oligonucleotide probe

SEQ ID NO: 34284 - DNA, 32 bp, Artificial; identical to SEQ ID NO: 5239
  oligonucleotide probe

SEQ ID NO: 34285 - DNA, 32 bp, Artificial; identical to SEQ ID NO: 5240
  oligonucleotide probe

SEQ ID NO: 34286 - DNA, 32 bp, Artificial; identical to SEQ ID NO: 5222
  oligonucleotide probe

SEQ ID NO: 34287 - DNA, 32 bp, Artificial; identical to SEQ ID NO: 5219
  oligonucleotide probe

SEQ ID NO: 34288 - DNA, 32 bp, Artificial; identical to SEQ ID NO: 5239
  oligonucleotide probe

SEQ ID NO: 34289 - DNA, 32 bp, Artificial; identical to SEQ ID NO: 5240
  oligonucleotide probe

SEQ ID NO: 34290 - DNA, 32 bp, Artificial; identical to SEQ ID NO: 5222
  oligonucleotide probe

SEQ ID NO: 34291 - DNA, 32 bp, Artificial; identical to SEQ ID NO: 5160
  oligonucleotide probe

SEQ ID NO: 34292 - DNA, 32 bp, Artificial; identical to SEQ ID NO: 5218
  oligonucleotide probe

SEQ ID NO: 34293 - DNA, 32 bp, Artificial; identical to SEQ ID NO: 5224
  oligonucleotide probe

SEQ ID NO: 34294 - DNA, 32 bp, Artificial; identical to SEQ ID NO: 5416
  oligonucleotide probe

SEQ ID NO: 34295 - DNA, 32 bp, Artificial; identical to SEQ ID NO: 5399
  oligonucleotide probe

SEQ ID NO: 34296 - DNA, 32 bp, Artificial; identical to SEQ ID NO: 5224
  oligonucleotide probe

SEQ ID NO: 34297 - DNA, 32 bp, Artificial; identical to SEQ ID NO: 5220
  oligonucleotide probe

SEQ ID NO: 34298 - DNA, 32 bp, Artificial; identical to SEQ ID NO: 5232
  oligonucleotide probe

SEQ ID NO: 34299 - DNA, 32 bp, Artificial; identical to SEQ ID NO: 5218
  oligonucleotide probe

SEQ ID NO: 34300 - DNA, 32 bp, Artificial; identical to SEQ ID NO: 5217
  oligonucleotide probe

SEQ ID NO: 34301 - DNA, 32 bp, Artificial; identical to SEQ ID NO: 5223
  oligonucleotide probe

SEQ ID NO: 34302 - DNA, 32 bp, Artificial; identical to SEQ ID NO: 5161
  oligonucleotide probe

SEQ ID NO: 34303 - DNA, 32 bp, Artificial; identical to SEQ ID NO: 5138
  oligonucleotide probe

SEQ ID NO: 34304 - DNA, 32 bp, Artificial; identical to SEQ ID NO: 5224
  oligonucleotide probe

SEQ ID NO: 34305 - DNA, 32 bp, Artificial; identical to SEQ ID NO: 5220
  oligonucleotide probe

SEQ ID NO: 34306 - DNA, 32 bp, Artificial; identical to SEQ ID NO: 5239
  oligonucleotide probe

SEQ ID NO: 34307 - DNA, 32 bp, Artificial; identical to SEQ ID NO: 5231
  oligonucleotide probe

SEQ ID NO: 34308 - DNA, 32 bp, Artificial; identical to SEQ ID NO: 5241
  oligonucleotide probe

SEQ ID NO: 34309 - DNA, 32 bp, Artificial; identical to SEQ ID NO: 5242
  oligonucleotide probe

SEQ ID NO: 34310 - DNA, 32 bp, Artificial; identical to SEQ ID NO: 5231
  oligonucleotide probe

SEQ ID NO: 34311 - DNA, 32 bp, Artificial; identical to SEQ ID NO: 5217
  oligonucleotide probe

SEQ ID NO: 34312 - DNA, 32 bp, Artificial; identical to SEQ ID NO: 5241
  oligonucleotide probe

SEQ ID NO: 34313 - DNA, 32 bp, Artificial; identical to SEQ ID NO: 5242
  oligonucleotide probe

SEQ ID NO: 34314 - DNA, 32 bp, Artificial; identical to SEQ ID NO: 5177
  oligonucleotide probe

SEQ ID NO: 34315 - DNA, 32 bp, Artificial; identical to SEQ ID NO: 5137
  oligonucleotide probe

SEQ ID NO: 34316 - DNA, 32 bp, Artificial; identical to SEQ ID NO: 5221
  oligonucleotide probe

SEQ ID NO: 34317 - DNA, 32 bp, Artificial; identical to SEQ ID NO: 5222
  oligonucleotide probe

SEQ ID NO: 34318 - DNA, 32 bp, Artificial; identical to SEQ ID NO: 5231
  oligonucleotide probe

SEQ ID NO: 34319 - DNA, 32 bp, Artificial; identical to SEQ ID NO: 5217
  oligonucleotide probe

SEQ ID NO: 34320 - DNA, 32 bp, Artificial; identical to SEQ ID NO: 5416
  oligonucleotide probe

SEQ ID NO: 34321 - DNA, 32 bp, Artificial; identical to SEQ ID NO: 5399
  oligonucleotide probe

SEQ ID NO: 34322 - DNA, 32 bp, Artificial; identical to SEQ ID NO: 5229
  oligonucleotide probe

SEQ ID NO: 34323 - DNA, 32 bp, Artificial; identical to SEQ ID NO: 5253
  oligonucleotide probe

SEQ ID NO: 34324 - DNA, 32 bp, Artificial; identical to SEQ ID NO: 5410
  oligonucleotide probe

SEQ ID NO: 34325 - DNA, 32 bp, Artificial; identical to SEQ ID NO: 5411
  oligonucleotide probe

SEQ ID NO: 34326 - DNA, 32 bp, Artificial; identical to SEQ ID NO: 5229
  oligonucleotide probe

SEQ ID NO: 34327 - DNA, 32 bp, Artificial; identical to SEQ ID NO: 5253
  oligonucleotide probe

SEQ ID NO: 34328 - DNA, 32 bp, Artificial; identical to SEQ ID NO: 5229
  oligonucleotide probe

SEQ ID NO: 34329 - DNA, 32 bp, Artificial; identical to SEQ ID NO: 5253
  oligonucleotide probe

SEQ ID NO: 34330 - DNA, 32 bp, Artificial; identical to SEQ ID NO: 5185
  oligonucleotide probe

SEQ ID NO: 34331 - DNA, 32 bp, Artificial; identical to SEQ ID NO: 5163
  oligonucleotide probe

SEQ ID NO: 34332 - DNA, 32 bp, Artificial; identical to SEQ ID NO: 5159
  oligonucleotide probe

SEQ ID NO: 34333 - DNA, 32 bp, Artificial; identical to SEQ ID NO: 5141
  oligonucleotide probe

SEQ ID NO: 34334 - DNA, 32 bp, Artificial; identical to SEQ ID NO: 5410
  oligonucleotide probe

SEQ ID NO: 34335 - DNA, 32 bp, Artificial; identical to SEQ ID NO: 5241
  oligonucleotide probe

SEQ ID NO: 34336 - DNA, 32 bp, Artificial; identical to SEQ ID NO: 5241
  oligonucleotide probe

SEQ ID NO: 34337 - DNA, 32 bp, Artificial; identical to SEQ ID NO: 5229
  oligonucleotide probe

SEQ ID NO: 34338 - DNA, 32 bp, Artificial; identical to SEQ ID NO: 5239
  oligonucleotide probe

SEQ ID NO: 34339 - DNA, 32 bp, Artificial; identical to SEQ ID NO: 5240
  oligonucleotide probe

SEQ ID NO: 34340 - DNA, 32 bp, Artificial; identical to SEQ ID NO: 5411
  oligonucleotide probe

SEQ ID NO: 34341 - DNA, 32 bp, Artificial; identical to SEQ ID NO: 5242
  oligonucleotide probe

SEQ ID NO: 34342 - DNA, 32 bp, Artificial; identical to SEQ ID NO: 5416
  oligonucleotide probe

SEQ ID NO: 34343 - DNA, 32 bp, Artificial; identical to SEQ ID NO: 5239
  oligonucleotide probe

SEQ ID NO: 34344 - DNA, 32 bp, Artificial; identical to SEQ ID NO: 5410
  oligonucleotide probe

SEQ ID NO: 34345 - DNA, 32 bp, Artificial; identical to SEQ ID NO: 5229
  oligonucleotide probe

SEQ ID NO: 34346 - DNA, 32 bp, Artificial; identical to SEQ ID NO: 5171
  oligonucleotide probe

SEQ ID NO: 34347 - DNA, 32 bp, Artificial; identical to SEQ ID NO: 5416
  oligonucleotide probe

SEQ ID NO: 34348 - DNA, 32 bp, Artificial; identical to SEQ ID NO: 5242
  oligonucleotide probe

SEQ ID NO: 34349 - DNA, 32 bp, Artificial; identical to SEQ ID NO: 5222
  oligonucleotide probe

SEQ ID NO: 34350 - DNA, 32 bp, Artificial; identical to SEQ ID NO: 5399
  oligonucleotide probe

SEQ ID NO: 34351 - DNA, 32 bp, Artificial; identical to SEQ ID NO: 5232
  oligonucleotide probe

SEQ ID NO: 34352 - DNA, 32 bp, Artificial; identical to SEQ ID NO: 5410
  oligonucleotide probe

SEQ ID NO: 34353 - DNA, 32 bp, Artificial; identical to SEQ ID NO: 5171
  oligonucleotide probe

SEQ ID NO: 34354 - DNA, 32 bp, Artificial; identical to SEQ ID NO: 5239
  oligonucleotide probe

SEQ ID NO: 34355 - DNA, 32 bp, Artificial; identical to SEQ ID NO: 5217
  oligonucleotide probe

SEQ ID NO: 34356 - DNA, 32 bp, Artificial; identical to SEQ ID NO: 5135
  oligonucleotide probe

SEQ ID NO: 34357 - DNA, 32 bp, Artificial; identical to SEQ ID NO: 5195
  oligonucleotide probe

SEQ ID NO: 34358 - DNA, 32 bp, Artificial; identical to SEQ ID NO: 5133
  oligonucleotide probe

SEQ ID NO: 34359 - DNA, 32 bp, Artificial; identical to SEQ ID NO: 5242
  oligonucleotide probe

SEQ ID NO: 34360 - DNA, 32 bp, Artificial; identical to SEQ ID NO: 5136
  oligonucleotide probe

SEQ ID NO: 34361 - DNA, 32 bp, Artificial; identical to SEQ ID NO: 5224
  oligonucleotide probe

SEQ ID NO: 34362 - DNA, 32 bp, Artificial; identical to SEQ ID NO: 5220
  oligonucleotide probe

SEQ ID NO: 34363 - DNA, 32 bp, Artificial; identical to SEQ ID NO: 5232
  oligonucleotide probe

SEQ ID NO: 34364 - DNA, 32 bp, Artificial; identical to SEQ ID NO: 5219
  oligonucleotide probe

SEQ ID NO: 34365 - DNA, 32 bp, Artificial; identical to SEQ ID NO: 5223
  oligonucleotide probe

SEQ ID NO: 34366 - DNA, 32 bp, Artificial; identical to SEQ ID NO: 5536
  oligonucleotide probe

SEQ ID NO: 34367 - DNA, 32 bp, Artificial; identical to SEQ ID NO: 5537
  oligonucleotide probe

SEQ ID NO: 34368 - DNA, 32 bp, Artificial; identical to SEQ ID NO: 5538
  oligonucleotide probe

SEQ ID NO: 34369 - DNA, 32 bp, Artificial; identical to SEQ ID NO: 5539
  oligonucleotide probe

SEQ ID NO: 34370 - DNA, 32 bp, Artificial; identical to SEQ ID NO: 5540
  oligonucleotide probe

SEQ ID NO: 34371 - DNA, 32 bp, Artificial; identical to SEQ ID NO: 5541
  oligonucleotide probe

SEQ ID NO: 34372 - DNA, 32 bp, Artificial; identical to SEQ ID NO: 5540
  oligonucleotide probe

SEQ ID NO: 34373 - DNA, 32 bp, Artificial; identical to SEQ ID NO: 5541
  oligonucleotide probe

SEQ ID NO: 34374 - DNA, 32 bp, Artificial; identical to SEQ ID NO: 5544
  oligonucleotide probe

SEQ ID NO: 34375 - DNA, 32 bp, Artificial; identical to SEQ ID NO: 5545
  oligonucleotide probe

SEQ ID NO: 34376 - DNA, 32 bp, Artificial; identical to SEQ ID NO: 5546
  oligonucleotide probe

SEQ ID NO: 34377 - DNA, 32 bp, Artificial; identical to SEQ ID NO: 5547
  oligonucleotide probe

SEQ ID NO: 34378 - DNA, 32 bp, Artificial; identical to SEQ ID NO: 5546
  oligonucleotide probe

SEQ ID NO: 34379 - DNA, 32 bp, Artificial; identical to SEQ ID NO: 5547
  oligonucleotide probe

SEQ ID NO: 34380 - DNA, 32 bp, Artificial; identical to SEQ ID NO: 5550
  oligonucleotide probe

SEQ ID NO: 34381 - DNA, 32 bp, Artificial; identical to SEQ ID NO: 5551
  oligonucleotide probe

SEQ ID NO: 34382 - DNA, 32 bp, Artificial; identical to SEQ ID NO: 5540
  oligonucleotide probe

SEQ ID NO: 34383 - DNA, 32 bp, Artificial; identical to SEQ ID NO: 5541
  oligonucleotide probe

SEQ ID NO: 34384 - DNA, 32 bp, Artificial; identical to SEQ ID NO: 5554
  oligonucleotide probe

SEQ ID NO: 34385 - DNA, 32 bp, Artificial; identical to SEQ ID NO: 5555
  oligonucleotide probe

SEQ ID NO: 34386 - DNA, 32 bp, Artificial; identical to SEQ ID NO: 5538
  oligonucleotide probe

SEQ ID NO: 34387 - DNA, 32 bp, Artificial; identical to SEQ ID NO: 5539
  oligonucleotide probe

SEQ ID NO: 34388 - DNA, 32 bp, Artificial; identical to SEQ ID NO: 5538
  oligonucleotide probe

SEQ ID NO: 34389 - DNA, 32 bp, Artificial; identical to SEQ ID NO: 5539
  oligonucleotide probe

SEQ ID NO: 34390 - DNA, 32 bp, Artificial; identical to SEQ ID NO: 5544
  oligonucleotide probe

SEQ ID NO: 34391 - DNA, 32 bp, Artificial; identical to SEQ ID NO: 5545
  oligonucleotide probe

SEQ ID NO: 34392 - DNA, 32 bp, Artificial; identical to SEQ ID NO: 5546
  oligonucleotide probe

SEQ ID NO: 34393 - DNA, 32 bp, Artificial; identical to SEQ ID NO: 5547
  oligonucleotide probe

SEQ ID NO: 34394 - DNA, 32 bp, Artificial; identical to SEQ ID NO: 5564
  oligonucleotide probe

SEQ ID NO: 34395 - DNA, 32 bp, Artificial; identical to SEQ ID NO: 5565
  oligonucleotide probe

SEQ ID NO: 34396 - DNA, 32 bp, Artificial; identical to SEQ ID NO: 5538
  oligonucleotide probe

SEQ ID NO: 34397 - DNA, 32 bp, Artificial; identical to SEQ ID NO: 5539
  oligonucleotide probe

SEQ ID NO: 34398 - DNA, 32 bp, Artificial; identical to SEQ ID NO: 5546
  oligonucleotide probe

SEQ ID NO: 34399 - DNA, 32 bp, Artificial; identical to SEQ ID NO: 5547
  oligonucleotide probe

SEQ ID NO: 34400 - DNA, 32 bp, Artificial; identical to SEQ ID NO: 5544
  oligonucleotide probe

SEQ ID NO: 34401 - DNA, 32 bp, Artificial; identical to SEQ ID NO: 5545
  oligonucleotide probe

SEQ ID NO: 34402 - DNA, 32 bp, Artificial; identical to SEQ ID NO: 5546
  oligonucleotide probe

SEQ ID NO: 34403 - DNA, 32 bp, Artificial; identical to SEQ ID NO: 5547
  oligonucleotide probe

SEQ ID NO: 34404 - DNA, 32 bp, Artificial; identical to SEQ ID NO: 5546
  oligonucleotide probe

SEQ ID NO: 34405 - DNA, 32 bp, Artificial; identical to SEQ ID NO: 5547
  oligonucleotide probe

SEQ ID NO: 34406 - DNA, 32 bp, Artificial; identical to SEQ ID NO: 5564
  oligonucleotide probe

SEQ ID NO: 34407 - DNA, 32 bp, Artificial; identical to SEQ ID NO: 5565
  oligonucleotide probe

SEQ ID NO: 34408 - DNA, 32 bp, Artificial; identical to SEQ ID NO: 5546
  oligonucleotide probe

SEQ ID NO: 34409 - DNA, 32 bp, Artificial; identical to SEQ ID NO: 5547
  oligonucleotide probe

SEQ ID NO: 34410 - DNA, 32 bp, Artificial; identical to SEQ ID NO: 5544
  oligonucleotide probe

SEQ ID NO: 34411 - DNA, 32 bp, Artificial; identical to SEQ ID NO: 5545
  oligonucleotide probe

SEQ ID NO: 34412 - DNA, 32 bp, Artificial; identical to SEQ ID NO: 5540
  oligonucleotide probe

SEQ ID NO: 34413 - DNA, 32 bp, Artificial; identical to SEQ ID NO: 5541
  oligonucleotide probe

SEQ ID NO: 34414 - DNA, 32 bp, Artificial; identical to SEQ ID NO: 5584
  oligonucleotide probe

SEQ ID NO: 34415 - DNA, 32 bp, Artificial; identical to SEQ ID NO: 5585
  oligonucleotide probe

SEQ ID NO: 34416 - DNA, 32 bp, Artificial; identical to SEQ ID NO: 5540
  oligonucleotide probe

SEQ ID NO: 34417 - DNA, 32 bp, Artificial; identical to SEQ ID NO: 5541
  oligonucleotide probe

SEQ ID NO: 34418 - DNA, 32 bp, Artificial; identical to SEQ ID NO: 5544
  oligonucleotide probe

SEQ ID NO: 34419 - DNA, 32 bp, Artificial; identical to SEQ ID NO: 5545
  oligonucleotide probe

SEQ ID NO: 34420 - DNA, 32 bp, Artificial; identical to SEQ ID NO: 5565
  oligonucleotide probe

SEQ ID NO: 34421 - DNA, 32 bp, Artificial; identical to SEQ ID NO: 5547
  oligonucleotide probe

SEQ ID NO: 34422 - DNA, 32 bp, Artificial; identical to SEQ ID NO: 5536
  oligonucleotide probe

SEQ ID NO: 34423 - DNA, 32 bp, Artificial; identical to SEQ ID NO: 5537
  oligonucleotide probe

SEQ ID NO: 34424 - DNA, 32 bp, Artificial; identical to SEQ ID NO: 5594
  oligonucleotide probe

SEQ ID NO: 34425 - DNA, 32 bp, Artificial; identical to SEQ ID NO: 5595
  oligonucleotide probe

SEQ ID NO: 34426 - DNA, 32 bp, Artificial; identical to SEQ ID NO: 5550
  oligonucleotide probe

SEQ ID NO: 34427 - DNA, 32 bp, Artificial; identical to SEQ ID NO: 5551
  oligonucleotide probe

SEQ ID NO: 34428 - DNA, 32 bp, Artificial; identical to SEQ ID NO: 5550
  oligonucleotide probe

SEQ ID NO: 34429 - DNA, 32 bp, Artificial; identical to SEQ ID NO: 5551
  oligonucleotide probe

SEQ ID NO: 34430 - DNA, 32 bp, Artificial; identical to SEQ ID NO: 5564
  oligonucleotide probe

SEQ ID NO: 34431 - DNA, 32 bp, Artificial; identical to SEQ ID NO: 5565
  oligonucleotide probe

SEQ ID NO: 34432 - DNA, 32 bp, Artificial; identical to SEQ ID NO: 5564
  oligonucleotide probe

SEQ ID NO: 34433 - DNA, 32 bp, Artificial; identical to SEQ ID NO: 5565
  oligonucleotide probe

SEQ ID NO: 34434 - DNA, 32 bp, Artificial; identical to SEQ ID NO: 5550
  oligonucleotide probe

SEQ ID NO: 34435 - DNA, 32 bp, Artificial; identical to SEQ ID NO: 5551
  oligonucleotide probe

SEQ ID NO: 34436 - DNA, 32 bp, Artificial; identical to SEQ ID NO: 5544
  oligonucleotide probe

SEQ ID NO: 34437 - DNA, 32 bp, Artificial; identical to SEQ ID NO: 5545
  oligonucleotide probe

SEQ ID NO: 34438 - DNA, 32 bp, Artificial; identical to SEQ ID NO: 5536
  oligonucleotide probe

SEQ ID NO: 34439 - DNA, 32 bp, Artificial; identical to SEQ ID NO: 5537
  oligonucleotide probe

SEQ ID NO: 34440 - DNA, 32 bp, Artificial; identical to SEQ ID NO: 5610
  oligonucleotide probe

SEQ ID NO: 34441 - DNA, 32 bp, Artificial; identical to SEQ ID NO: 5611
  oligonucleotide probe

SEQ ID NO: 34442 - DNA, 32 bp, Artificial; identical to SEQ ID NO: 5610
  oligonucleotide probe

SEQ ID NO: 34443 - DNA, 32 bp, Artificial; identical to SEQ ID NO: 5611
  oligonucleotide probe

SEQ ID NO: 34444 - DNA, 32 bp, Artificial; identical to SEQ ID NO: 5564
  oligonucleotide probe

SEQ ID NO: 34445 - DNA, 32 bp, Artificial; identical to SEQ ID NO: 5565
  oligonucleotide probe

SEQ ID NO: 34446 - DNA, 32 bp, Artificial; identical to SEQ ID NO: 5594
  oligonucleotide probe

SEQ ID NO: 34447 - DNA, 32 bp, Artificial; identical to SEQ ID NO: 5595
  oligonucleotide probe

SEQ ID NO: 34448 - DNA, 32 bp, Artificial; identical to SEQ ID NO: 5536
  oligonucleotide probe

SEQ ID NO: 34449 - DNA, 32 bp, Artificial; identical to SEQ ID NO: 5537
  oligonucleotide probe

SEQ ID NO: 34450 - DNA, 32 bp, Artificial; identical to SEQ ID NO: 5584
  oligonucleotide probe

SEQ ID NO: 34451 - DNA, 32 bp, Artificial; identical to SEQ ID NO: 5585
  oligonucleotide probe

SEQ ID NO: 34452 - DNA, 32 bp, Artificial; identical to SEQ ID NO: 5584
  oligonucleotide probe

SEQ ID NO: 34453 - DNA, 32 bp, Artificial; identical to SEQ ID NO: 5585
  oligonucleotide probe

SEQ ID NO: 34454 - DNA, 32 bp, Artificial; identical to SEQ ID NO: 5584
  oligonucleotide probe

SEQ ID NO: 34455 - DNA, 32 bp, Artificial; identical to SEQ ID NO: 5585
  oligonucleotide probe

SEQ ID NO: 34456 - DNA, 32 bp, Artificial; identical to SEQ ID NO: 5550
  oligonucleotide probe

SEQ ID NO: 34457 - DNA, 32 bp, Artificial; identical to SEQ ID NO: 5551
  oligonucleotide probe

SEQ ID NO: 34458 - DNA, 32 bp, Artificial; identical to SEQ ID NO: 5544
  oligonucleotide probe

SEQ ID NO: 34459 - DNA, 32 bp, Artificial; identical to SEQ ID NO: 5545
  oligonucleotide probe

SEQ ID NO: 34460 - DNA, 32 bp, Artificial; identical to SEQ ID NO: 5540
  oligonucleotide probe

SEQ ID NO: 34461 - DNA, 32 bp, Artificial; identical to SEQ ID NO: 5541
  oligonucleotide probe

SEQ ID NO: 34462 - DNA, 32 bp, Artificial; identical to SEQ ID NO: 5538
  oligonucleotide probe

SEQ ID NO: 34463 - DNA, 32 bp, Artificial; identical to SEQ ID NO: 5539
  oligonucleotide probe

SEQ ID NO: 34464 - DNA, 32 bp, Artificial; identical to SEQ ID NO: 5546
  oligonucleotide probe

SEQ ID NO: 34465 - DNA, 32 bp, Artificial; identical to SEQ ID NO: 5547
  oligonucleotide probe

SEQ ID NO: 34466 - DNA, 32 bp, Artificial; identical to SEQ ID NO: 5536
  oligonucleotide probe

SEQ ID NO: 34467 - DNA, 32 bp, Artificial; identical to SEQ ID NO: 5537
  oligonucleotide probe

SEQ ID NO: 34468 - DNA, 32 bp, Artificial; identical to SEQ ID NO: 5544
  oligonucleotide probe

SEQ ID NO: 34469 - DNA, 32 bp, Artificial; identical to SEQ ID NO: 5545
  oligonucleotide probe

SEQ ID NO: 34470 - DNA, 32 bp, Artificial; identical to SEQ ID NO: 5536
  oligonucleotide probe

SEQ ID NO: 34471 - DNA, 32 bp, Artificial; identical to SEQ ID NO: 5537
  oligonucleotide probe

SEQ ID NO: 34472 - DNA, 32 bp, Artificial; identical to SEQ ID NO: 5536
  oligonucleotide probe

SEQ ID NO: 34473 - DNA, 32 bp, Artificial; identical to SEQ ID NO: 5537
  oligonucleotide probe

SEQ ID NO: 34474 - DNA, 32 bp, Artificial; identical to SEQ ID NO: 5536
  oligonucleotide probe

SEQ ID NO: 34475 - DNA, 32 bp, Artificial; identical to SEQ ID NO: 5537
  oligonucleotide probe

SEQ ID NO: 34476 - DNA, 32 bp, Artificial; identical to SEQ ID NO: 5540
  oligonucleotide probe

SEQ ID NO: 34477 - DNA, 32 bp, Artificial; identical to SEQ ID NO: 5541
  oligonucleotide probe

SEQ ID NO: 34478 - DNA, 32 bp, Artificial; identical to SEQ ID NO: 5544
  oligonucleotide probe

SEQ ID NO: 34479 - DNA, 32 bp, Artificial; identical to SEQ ID NO: 5545
  oligonucleotide probe

SEQ ID NO: 34480 - DNA, 32 bp, Artificial; identical to SEQ ID NO: 5550
  oligonucleotide probe

SEQ ID NO: 34481 - DNA, 32 bp, Artificial; identical to SEQ ID NO: 5551
  oligonucleotide probe

SEQ ID NO: 34482 - DNA, 32 bp, Artificial; identical to SEQ ID NO: 5536
  oligonucleotide probe

SEQ ID NO: 34483 - DNA, 32 bp, Artificial; identical to SEQ ID NO: 5537
  oligonucleotide probe

SEQ ID NO: 34484 - DNA, 32 bp, Artificial; identical to SEQ ID NO: 5536
  oligonucleotide probe

SEQ ID NO: 34485 - DNA, 32 bp, Artificial; identical to SEQ ID NO: 5537
  oligonucleotide probe

SEQ ID NO: 34486 - DNA, 32 bp, Artificial; identical to SEQ ID NO: 5546
  oligonucleotide probe

SEQ ID NO: 34487 - DNA, 32 bp, Artificial; identical to SEQ ID NO: 5547
  oligonucleotide probe

SEQ ID NO: 34488 - DNA, 32 bp, Artificial; identical to SEQ ID NO: 5540
  oligonucleotide probe

SEQ ID NO: 34489 - DNA, 32 bp, Artificial; identical to SEQ ID NO: 5541
  oligonucleotide probe

SEQ ID NO: 34490 - DNA, 32 bp, Artificial; identical to SEQ ID NO: 5564
  oligonucleotide probe

SEQ ID NO: 34491 - DNA, 32 bp, Artificial; identical to SEQ ID NO: 5565
  oligonucleotide probe

SEQ ID NO: 34492 - DNA, 32 bp, Artificial; identical to SEQ ID NO: 5546
  oligonucleotide probe

SEQ ID NO: 34493 - DNA, 32 bp, Artificial; identical to SEQ ID NO: 5547
  oligonucleotide probe

SEQ ID NO: 34494 - DNA, 32 bp, Artificial; identical to SEQ ID NO: 5544
  oligonucleotide probe

SEQ ID NO: 34495 - DNA, 32 bp, Artificial; identical to SEQ ID NO: 5545
  oligonucleotide probe

SEQ ID NO: 34496 - DNA, 32 bp, Artificial; identical to SEQ ID NO: 5544
  oligonucleotide probe

SEQ ID NO: 34497 - DNA, 32 bp, Artificial; identical to SEQ ID NO: 5545
  oligonucleotide probe

SEQ ID NO: 34498 - DNA, 32 bp, Artificial; identical to SEQ ID NO: 5536
  oligonucleotide probe

SEQ ID NO: 34499 - DNA, 32 bp, Artificial; identical to SEQ ID NO: 5537
  oligonucleotide probe

SEQ ID NO: 34500 - DNA, 32 bp, Artificial; identical to SEQ ID NO: 5565
  oligonucleotide probe

SEQ ID NO: 34501 - DNA, 32 bp, Artificial; identical to SEQ ID NO: 5547
  oligonucleotide probe

SEQ ID NO: 34502 - DNA, 32 bp, Artificial; identical to SEQ ID NO: 5550
  oligonucleotide probe

SEQ ID NO: 34503 - DNA, 32 bp, Artificial; identical to SEQ ID NO: 5551
  oligonucleotide probe

SEQ ID NO: 34504 - DNA, 32 bp, Artificial; identical to SEQ ID NO: 5546
  oligonucleotide probe

SEQ ID NO: 34505 - DNA, 32 bp, Artificial; identical to SEQ ID NO: 5547
  oligonucleotide probe

SEQ ID NO: 34506 - DNA, 32 bp, Artificial; identical to SEQ ID NO: 5550
  oligonucleotide probe

SEQ ID NO: 34507 - DNA, 32 bp, Artificial; identical to SEQ ID NO: 5551
  oligonucleotide probe

SEQ ID NO: 34508 - DNA, 32 bp, Artificial; identical to SEQ ID NO: 5536
  oligonucleotide probe

SEQ ID NO: 34509 - DNA, 32 bp, Artificial; identical to SEQ ID NO: 5537
  oligonucleotide probe

SEQ ID NO: 34510 - DNA, 32 bp, Artificial; identical to SEQ ID NO: 5540
  oligonucleotide probe

SEQ ID NO: 34511 - DNA, 32 bp, Artificial; identical to SEQ ID NO: 5541
  oligonucleotide probe

SEQ ID NO: 34512 - DNA, 32 bp, Artificial; identical to SEQ ID NO: 5564
  oligonucleotide probe

SEQ ID NO: 34513 - DNA, 32 bp, Artificial; identical to SEQ ID NO: 5565
  oligonucleotide probe

SEQ ID NO: 34514 - DNA, 32 bp, Artificial; identical to SEQ ID NO: 5544
  oligonucleotide probe

SEQ ID NO: 34515 - DNA, 32 bp, Artificial; identical to SEQ ID NO: 5545
  oligonucleotide probe

SEQ ID NO: 34516 - DNA, 32 bp, Artificial; identical to SEQ ID NO: 5564
  oligonucleotide probe

SEQ ID NO: 34517 - DNA, 32 bp, Artificial; identical to SEQ ID NO: 5565
  oligonucleotide probe

SEQ ID NO: 34518 - DNA, 32 bp, Artificial; identical to SEQ ID NO: 5546
  oligonucleotide probe

SEQ ID NO: 34519 - DNA, 32 bp, Artificial; identical to SEQ ID NO: 5547
  oligonucleotide probe

SEQ ID NO: 34520 - DNA, 32 bp, Artificial; identical to SEQ ID NO: 5550
  oligonucleotide probe

SEQ ID NO: 34521 - DNA, 32 bp, Artificial; identical to SEQ ID NO: 5551
  oligonucleotide probe

SEQ ID NO: 34522 - DNA, 32 bp, Artificial; identical to SEQ ID NO: 5564
  oligonucleotide probe

SEQ ID NO: 34523 - DNA, 32 bp, Artificial; identical to SEQ ID NO: 5565
  oligonucleotide probe

SEQ ID NO: 34524 - DNA, 32 bp, Artificial; identical to SEQ ID NO: 5536
  oligonucleotide probe

SEQ ID NO: 34525 - DNA, 32 bp, Artificial; identical to SEQ ID NO: 5537
  oligonucleotide probe

SEQ ID NO: 34526 - DNA, 32 bp, Artificial; identical to SEQ ID NO: 5546
  oligonucleotide probe

SEQ ID NO: 34527 - DNA, 32 bp, Artificial; identical to SEQ ID NO: 5547
  oligonucleotide probe

SEQ ID NO: 34528 - DNA, 32 bp, Artificial; identical to SEQ ID NO: 5584
  oligonucleotide probe

SEQ ID NO: 34529 - DNA, 32 bp, Artificial; identical to SEQ ID NO: 5585
  oligonucleotide probe

SEQ ID NO: 34530 - DNA, 32 bp, Artificial; identical to SEQ ID NO: 5540
  oligonucleotide probe

SEQ ID NO: 34531 - DNA, 32 bp, Artificial; identical to SEQ ID NO: 5541
  oligonucleotide probe

SEQ ID NO: 34532 - DNA, 32 bp, Artificial; identical to SEQ ID NO: 5564
  oligonucleotide probe

SEQ ID NO: 34533 - DNA, 32 bp, Artificial; identical to SEQ ID NO: 5565
  oligonucleotide probe

SEQ ID NO: 34534 - DNA, 32 bp, Artificial; identical to SEQ ID NO: 5536
  oligonucleotide probe

SEQ ID NO: 34535 - DNA, 32 bp, Artificial; identical to SEQ ID NO: 5537
  oligonucleotide probe

SEQ ID NO: 34536 - DNA, 32 bp, Artificial; identical to SEQ ID NO: 5584
  oligonucleotide probe

SEQ ID NO: 34537 - DNA, 32 bp, Artificial; identical to SEQ ID NO: 5585
  oligonucleotide probe

SEQ ID NO: 34538 - DNA, 32 bp, Artificial; identical to SEQ ID NO: 5708
  oligonucleotide probe

SEQ ID NO: 34539 - DNA, 32 bp, Artificial; identical to SEQ ID NO: 5709
  oligonucleotide probe

SEQ ID NO: 34540 - DNA, 32 bp, Artificial; identical to SEQ ID NO: 5538
  oligonucleotide probe

SEQ ID NO: 34541 - DNA, 32 bp, Artificial; identical to SEQ ID NO: 5539
  oligonucleotide probe

SEQ ID NO: 34542 - DNA, 32 bp, Artificial; identical to SEQ ID NO: 5610
  oligonucleotide probe

SEQ ID NO: 34543 - DNA, 32 bp, Artificial; identical to SEQ ID NO: 5611
  oligonucleotide probe

SEQ ID NO: 34544 - DNA, 32 bp, Artificial; identical to SEQ ID NO: 5564
  oligonucleotide probe

SEQ ID NO: 34545 - DNA, 32 bp, Artificial; identical to SEQ ID NO: 5565
  oligonucleotide probe

SEQ ID NO: 34546 - DNA, 32 bp, Artificial; identical to SEQ ID NO: 5594
  oligonucleotide probe

SEQ ID NO: 34547 - DNA, 32 bp, Artificial; identical to SEQ ID NO: 5595
  oligonucleotide probe

SEQ ID NO: 34548 - DNA, 32 bp, Artificial; identical to SEQ ID NO: 5610
  oligonucleotide probe

SEQ ID NO: 34549 - DNA, 32 bp, Artificial; identical to SEQ ID NO: 5611
  oligonucleotide probe

SEQ ID NO: 34550 - DNA, 32 bp, Artificial; identical to SEQ ID NO: 5538
  oligonucleotide probe

SEQ ID NO: 34551 - DNA, 32 bp, Artificial; identical to SEQ ID NO: 5539
  oligonucleotide probe

SEQ ID NO: 34552 - DNA, 32 bp, Artificial; identical to SEQ ID NO: 5584
  oligonucleotide probe

SEQ ID NO: 34553 - DNA, 32 bp, Artificial; identical to SEQ ID NO: 5585
  oligonucleotide probe

SEQ ID NO: 34554 - DNA, 32 bp, Artificial; identical to SEQ ID NO: 5546
  oligonucleotide probe

SEQ ID NO: 34555 - DNA, 32 bp, Artificial; identical to SEQ ID NO: 5547
  oligonucleotide probe

SEQ ID NO: 34556 - DNA, 32 bp, Artificial; identical to SEQ ID NO: 5564
  oligonucleotide probe

SEQ ID NO: 34557 - DNA, 32 bp, Artificial; identical to SEQ ID NO: 5565
  oligonucleotide probe

SEQ ID NO: 34558 - DNA, 32 bp, Artificial; identical to SEQ ID NO: 5564
  oligonucleotide probe

SEQ ID NO: 34559 - DNA, 32 bp, Artificial; identical to SEQ ID NO: 5565
  oligonucleotide probe

SEQ ID NO: 34560 - DNA, 32 bp, Artificial; identical to SEQ ID NO: 5544
  oligonucleotide probe

SEQ ID NO: 34561 - DNA, 32 bp, Artificial; identical to SEQ ID NO: 5545
  oligonucleotide probe

SEQ ID NO: 34562 - DNA, 32 bp, Artificial; identical to SEQ ID NO: 5536
  oligonucleotide probe

SEQ ID NO: 34563 - DNA, 32 bp, Artificial; identical to SEQ ID NO: 5537
  oligonucleotide probe

SEQ ID NO: 34564 - DNA, 32 bp, Artificial; identical to SEQ ID NO: 5536
  oligonucleotide probe

SEQ ID NO: 34565 - DNA, 32 bp, Artificial; identical to SEQ ID NO: 5537
  oligonucleotide probe

SEQ ID NO: 34566 - DNA, 32 bp, Artificial; identical to SEQ ID NO: 5554
  oligonucleotide probe

SEQ ID NO: 34567 - DNA, 32 bp, Artificial; identical to SEQ ID NO: 5555
  oligonucleotide probe

SEQ ID NO: 34568 - DNA, 32 bp, Artificial; identical to SEQ ID NO: 5564
  oligonucleotide probe

SEQ ID NO: 34569 - DNA, 32 bp, Artificial; identical to SEQ ID NO: 5565
  oligonucleotide probe

SEQ ID NO: 34570 - DNA, 32 bp, Artificial; identical to SEQ ID NO: 5550
  oligonucleotide probe

SEQ ID NO: 34571 - DNA, 32 bp, Artificial; identical to SEQ ID NO: 5551
  oligonucleotide probe

SEQ ID NO: 34572 - DNA, 32 bp, Artificial; identical to SEQ ID NO: 5554
  oligonucleotide probe

SEQ ID NO: 34573 - DNA, 32 bp, Artificial; identical to SEQ ID NO: 5555
  oligonucleotide probe

SEQ ID NO: 34574 - DNA, 32 bp, Artificial; identical to SEQ ID NO: 5594
  oligonucleotide probe

SEQ ID NO: 34575 - DNA, 32 bp, Artificial; identical to SEQ ID NO: 5595
  oligonucleotide probe

SEQ ID NO: 34576 - DNA, 32 bp, Artificial; identical to SEQ ID NO: 5550
  oligonucleotide probe

SEQ ID NO: 34577 - DNA, 32 bp, Artificial; identical to SEQ ID NO: 5551
  oligonucleotide probe

SEQ ID NO: 34578 - DNA, 32 bp, Artificial; identical to SEQ ID NO: 5536
  oligonucleotide probe

SEQ ID NO: 34579 - DNA, 32 bp, Artificial; identical to SEQ ID NO: 5537
  oligonucleotide probe

SEQ ID NO: 34580 - DNA, 32 bp, Artificial; identical to SEQ ID NO: 5564
  oligonucleotide probe

SEQ ID NO: 34581 - DNA, 32 bp, Artificial; identical to SEQ ID NO: 5565
  oligonucleotide probe

SEQ ID NO: 34582 - DNA, 32 bp, Artificial; identical to SEQ ID NO: 5540
  oligonucleotide probe

SEQ ID NO: 34583 - DNA, 32 bp, Artificial; identical to SEQ ID NO: 5541
  oligonucleotide probe

SEQ ID NO: 34584 - DNA, 32 bp, Artificial; identical to SEQ ID NO: 5540
  oligonucleotide probe

SEQ ID NO: 34585 - DNA, 32 bp, Artificial; identical to SEQ ID NO: 5541
  oligonucleotide probe

SEQ ID NO: 34586 - DNA, 32 bp, Artificial; identical to SEQ ID NO: 5550
  oligonucleotide probe

SEQ ID NO: 34587 - DNA, 32 bp, Artificial; identical to SEQ ID NO: 5551
  oligonucleotide probe

SEQ ID NO: 34588 - DNA, 32 bp, Artificial; identical to SEQ ID NO: 5538
  oligonucleotide probe

SEQ ID NO: 34589 - DNA, 32 bp, Artificial; identical to SEQ ID NO: 5539
  oligonucleotide probe

SEQ ID NO: 34590 - DNA, 32 bp, Artificial; identical to SEQ ID NO: 5594
  oligonucleotide probe

SEQ ID NO: 34591 - DNA, 32 bp, Artificial; identical to SEQ ID NO: 5595
  oligonucleotide probe

SEQ ID NO: 34592 - DNA, 32 bp, Artificial; identical to SEQ ID NO: 5536
  oligonucleotide probe

SEQ ID NO: 34593 - DNA, 32 bp, Artificial; identical to SEQ ID NO: 5537
  oligonucleotide probe

SEQ ID NO: 34594 - DNA, 32 bp, Artificial; identical to SEQ ID NO: 5554
  oligonucleotide probe

SEQ ID NO: 34595 - DNA, 32 bp, Artificial; identical to SEQ ID NO: 5555
  oligonucleotide probe

SEQ ID NO: 34596 - DNA, 32 bp, Artificial; identical to SEQ ID NO: 5536
  oligonucleotide probe

SEQ ID NO: 34597 - DNA, 32 bp, Artificial; identical to SEQ ID NO: 5537
  oligonucleotide probe

SEQ ID NO: 34598 - DNA, 32 bp, Artificial; identical to SEQ ID NO: 5540
  oligonucleotide probe

SEQ ID NO: 34599 - DNA, 32 bp, Artificial; identical to SEQ ID NO: 5541
  oligonucleotide probe

SEQ ID NO: 34600 - DNA, 32 bp, Artificial; identical to SEQ ID NO: 5546
  oligonucleotide probe

SEQ ID NO: 34601 - DNA, 32 bp, Artificial; identical to SEQ ID NO: 5547
  oligonucleotide probe

SEQ ID NO: 34602 - DNA, 32 bp, Artificial; identical to SEQ ID NO: 5546
  oligonucleotide probe

SEQ ID NO: 34603 - DNA, 32 bp, Artificial; identical to SEQ ID NO: 5547
  oligonucleotide probe

SEQ ID NO: 34604 - DNA, 32 bp, Artificial; identical to SEQ ID NO: 5538
  oligonucleotide probe

SEQ ID NO: 34605 - DNA, 32 bp, Artificial; identical to SEQ ID NO: 5539
  oligonucleotide probe

SEQ ID NO: 34606 - DNA, 32 bp, Artificial; identical to SEQ ID NO: 5538
  oligonucleotide probe

SEQ ID NO: 34607 - DNA, 32 bp, Artificial; identical to SEQ ID NO: 5539
  oligonucleotide probe

SEQ ID NO: 34608 - DNA, 32 bp, Artificial; identical to SEQ ID NO: 5594
  oligonucleotide probe

SEQ ID NO: 34609 - DNA, 32 bp, Artificial; identical to SEQ ID NO: 5595
  oligonucleotide probe

SEQ ID NO: 34610 - DNA, 32 bp, Artificial; identical to SEQ ID NO: 5540
  oligonucleotide probe

SEQ ID NO: 34611 - DNA, 32 bp, Artificial; identical to SEQ ID NO: 5541
  oligonucleotide probe

SEQ ID NO: 34612 - DNA, 32 bp, Artificial; identical to SEQ ID NO: 5540
  oligonucleotide probe

SEQ ID NO: 34613 - DNA, 32 bp, Artificial; identical to SEQ ID NO: 5541
  oligonucleotide probe

SEQ ID NO: 34614 - DNA, 32 bp, Artificial; identical to SEQ ID NO: 5564
  oligonucleotide probe

SEQ ID NO: 34615 - DNA, 32 bp, Artificial; identical to SEQ ID NO: 5565
  oligonucleotide probe

SEQ ID NO: 34616 - DNA, 32 bp, Artificial; identical to SEQ ID NO: 5536
  oligonucleotide probe

SEQ ID NO: 34617 - DNA, 32 bp, Artificial; identical to SEQ ID NO: 5537
  oligonucleotide probe

SEQ ID NO: 34618 - DNA, 32 bp, Artificial; identical to SEQ ID NO: 5546
  oligonucleotide probe

SEQ ID NO: 34619 - DNA, 32 bp, Artificial; identical to SEQ ID NO: 5547
  oligonucleotide probe

SEQ ID NO: 34620 - DNA, 32 bp, Artificial; identical to SEQ ID NO: 5564
  oligonucleotide probe

SEQ ID NO: 34621 - DNA, 32 bp, Artificial; identical to SEQ ID NO: 5565
  oligonucleotide probe

SEQ ID NO: 34622 - DNA, 32 bp, Artificial; identical to SEQ ID NO: 5564
  oligonucleotide probe

SEQ ID NO: 34623 - DNA, 32 bp, Artificial; identical to SEQ ID NO: 5565
  oligonucleotide probe

SEQ ID NO: 34624 - DNA, 32 bp, Artificial; identical to SEQ ID NO: 5708
  oligonucleotide probe

SEQ ID NO: 34625 - DNA, 32 bp, Artificial; identical to SEQ ID NO: 5709
  oligonucleotide probe

SEQ ID NO: 34626 - DNA, 32 bp, Artificial; identical to SEQ ID NO: 5584
  oligonucleotide probe

SEQ ID NO: 34627 - DNA, 32 bp, Artificial; identical to SEQ ID NO: 5585
  oligonucleotide probe

SEQ ID NO: 34628 - DNA, 32 bp, Artificial; identical to SEQ ID NO: 5554
  oligonucleotide probe

SEQ ID NO: 34629 - DNA, 32 bp, Artificial; identical to SEQ ID NO: 5555
  oligonucleotide probe

SEQ ID NO: 34630 - DNA, 32 bp, Artificial; identical to SEQ ID NO: 5554
  oligonucleotide probe

SEQ ID NO: 34631 - DNA, 32 bp, Artificial; identical to SEQ ID NO: 5555
  oligonucleotide probe

SEQ ID NO: 34632 - DNA, 32 bp, Artificial; identical to SEQ ID NO: 5544
  oligonucleotide probe

SEQ ID NO: 34633 - DNA, 32 bp, Artificial; identical to SEQ ID NO: 5545
  oligonucleotide probe

SEQ ID NO: 34634 - DNA, 32 bp, Artificial; identical to SEQ ID NO: 5546
  oligonucleotide probe

SEQ ID NO: 34635 - DNA, 32 bp, Artificial; identical to SEQ ID NO: 5547
  oligonucleotide probe

SEQ ID NO: 34636 - DNA, 32 bp, Artificial; identical to SEQ ID NO: 5536
  oligonucleotide probe

SEQ ID NO: 34637 - DNA, 32 bp, Artificial; identical to SEQ ID NO: 5537
  oligonucleotide probe

SEQ ID NO: 34638 - DNA, 32 bp, Artificial; identical to SEQ ID NO: 5565
  oligonucleotide probe

SEQ ID NO: 34639 - DNA, 32 bp, Artificial; identical to SEQ ID NO: 5547
  oligonucleotide probe

SEQ ID NO: 34640 - DNA, 32 bp, Artificial; identical to SEQ ID NO: 5544
  oligonucleotide probe

SEQ ID NO: 34641 - DNA, 32 bp, Artificial; identical to SEQ ID NO: 5545
  oligonucleotide probe

SEQ ID NO: 34642 - DNA, 32 bp, Artificial; identical to SEQ ID NO: 5536
  oligonucleotide probe

SEQ ID NO: 34643 - DNA, 32 bp, Artificial; identical to SEQ ID NO: 5537
  oligonucleotide probe

SEQ ID NO: 34644 - DNA, 32 bp, Artificial; identical to SEQ ID NO: 5550
  oligonucleotide probe

SEQ ID NO: 34645 - DNA, 32 bp, Artificial; identical to SEQ ID NO: 5551
  oligonucleotide probe

SEQ ID NO: 34646 - DNA, 32 bp, Artificial; identical to SEQ ID NO: 5544
  oligonucleotide probe

SEQ ID NO: 34647 - DNA, 32 bp, Artificial; identical to SEQ ID NO: 5545
  oligonucleotide probe

SEQ ID NO: 34648 - DNA, 32 bp, Artificial; identical to SEQ ID NO: 5554
  oligonucleotide probe

SEQ ID NO: 34649 - DNA, 32 bp, Artificial; identical to SEQ ID NO: 5555
  oligonucleotide probe

SEQ ID NO: 34650 - DNA, 32 bp, Artificial; identical to SEQ ID NO: 5540
  oligonucleotide probe

SEQ ID NO: 34651 - DNA, 32 bp, Artificial; identical to SEQ ID NO: 5541
  oligonucleotide probe

SEQ ID NO: 34652 - DNA, 32 bp, Artificial; identical to SEQ ID NO: 5564
  oligonucleotide probe

SEQ ID NO: 34653 - DNA, 32 bp, Artificial; identical to SEQ ID NO: 5565
  oligonucleotide probe

SEQ ID NO: 34654 - DNA, 32 bp, Artificial; identical to SEQ ID NO: 5546
  oligonucleotide probe

SEQ ID NO: 34655 - DNA, 32 bp, Artificial; identical to SEQ ID NO: 5547
  oligonucleotide probe

SEQ ID NO: 34656 - DNA, 32 bp, Artificial; identical to SEQ ID NO: 5554
  oligonucleotide probe

SEQ ID NO: 34657 - DNA, 32 bp, Artificial; identical to SEQ ID NO: 5555
  oligonucleotide probe

SEQ ID NO: 34658 - DNA, 32 bp, Artificial; identical to SEQ ID NO: 5584
  oligonucleotide probe

SEQ ID NO: 34659 - DNA, 32 bp, Artificial; identical to SEQ ID NO: 5585
  oligonucleotide probe

SEQ ID NO: 34660 - DNA, 32 bp, Artificial; identical to SEQ ID NO: 5546
  oligonucleotide probe

SEQ ID NO: 34661 - DNA, 32 bp, Artificial; identical to SEQ ID NO: 5547
  oligonucleotide probe

SEQ ID NO: 34662 - DNA, 32 bp, Artificial; identical to SEQ ID NO: 5544
  oligonucleotide probe

SEQ ID NO: 34663 - DNA, 32 bp, Artificial; identical to SEQ ID NO: 5545
  oligonucleotide probe

SEQ ID NO: 34664 - DNA, 32 bp, Artificial; identical to SEQ ID NO: 5565
  oligonucleotide probe

SEQ ID NO: 34665 - DNA, 32 bp, Artificial; identical to SEQ ID NO: 5547
  oligonucleotide probe

SEQ ID NO: 34666 - DNA, 32 bp, Artificial; identical to SEQ ID NO: 5584
  oligonucleotide probe

SEQ ID NO: 34667 - DNA, 32 bp, Artificial; identical to SEQ ID NO: 5585
  oligonucleotide probe

SEQ ID NO: 34668 - DNA, 32 bp, Artificial; identical to SEQ ID NO: 5538
  oligonucleotide probe

SEQ ID NO: 34669 - DNA, 32 bp, Artificial; identical to SEQ ID NO: 5539
  oligonucleotide probe

SEQ ID NO: 34670 - DNA, 32 bp, Artificial; identical to SEQ ID NO: 5544
  oligonucleotide probe

SEQ ID NO: 34671 - DNA, 32 bp, Artificial; identical to SEQ ID NO: 5545
  oligonucleotide probe

SEQ ID NO: 34672 - DNA, 32 bp, Artificial; identical to SEQ ID NO: 5550
  oligonucleotide probe

SEQ ID NO: 34673 - DNA, 32 bp, Artificial; identical to SEQ ID NO: 5551
  oligonucleotide probe

SEQ ID NO: 34674 - DNA, 32 bp, Artificial; identical to SEQ ID NO: 5564
  oligonucleotide probe

SEQ ID NO: 34675 - DNA, 32 bp, Artificial; identical to SEQ ID NO: 5565
  oligonucleotide probe

SEQ ID NO: 34676 - DNA, 32 bp, Artificial; identical to SEQ ID NO: 5536
  oligonucleotide probe

SEQ ID NO: 34677 - DNA, 32 bp, Artificial; identical to SEQ ID NO: 5537
  oligonucleotide probe

SEQ ID NO: 34678 - DNA, 32 bp, Artificial; identical to SEQ ID NO: 5584
  oligonucleotide probe

SEQ ID NO: 34679 - DNA, 32 bp, Artificial; identical to SEQ ID NO: 5585
  oligonucleotide probe

SEQ ID NO: 34680 - DNA, 32 bp, Artificial; identical to SEQ ID NO: 5708
  oligonucleotide probe

SEQ ID NO: 34681 - DNA, 32 bp, Artificial; identical to SEQ ID NO: 5709
  oligonucleotide probe

SEQ ID NO: 34682 - DNA, 32 bp, Artificial; identical to SEQ ID NO: 5554
  oligonucleotide probe

SEQ ID NO: 34683 - DNA, 32 bp, Artificial; identical to SEQ ID NO: 5555
  oligonucleotide probe

SEQ ID NO: 34684 - DNA, 32 bp, Artificial; identical to SEQ ID NO: 5594
  oligonucleotide probe

SEQ ID NO: 34685 - DNA, 32 bp, Artificial; identical to SEQ ID NO: 5595
  oligonucleotide probe

SEQ ID NO: 34686 - DNA, 32 bp, Artificial; identical to SEQ ID NO: 5536
  oligonucleotide probe

SEQ ID NO: 34687 - DNA, 32 bp, Artificial; identical to SEQ ID NO: 5537
  oligonucleotide probe

SEQ ID NO: 34688 - DNA, 32 bp, Artificial; identical to SEQ ID NO: 5541
  oligonucleotide probe

SEQ ID NO: 34689 - DNA, 32 bp, Artificial; identical to SEQ ID NO: 5545
  oligonucleotide probe

SEQ ID NO: 34690 - DNA, 32 bp, Artificial; identical to SEQ ID NO: 5594
  oligonucleotide probe

SEQ ID NO: 34691 - DNA, 32 bp, Artificial; identical to SEQ ID NO: 5595
  oligonucleotide probe

SEQ ID NO: 34692 - DNA, 32 bp, Artificial; identical to SEQ ID NO: 5536
  oligonucleotide probe

SEQ ID NO: 34693 - DNA, 32 bp, Artificial; identical to SEQ ID NO: 5537
  oligonucleotide probe

SEQ ID NO: 34694 - DNA, 32 bp, Artificial; identical to SEQ ID NO: 5546
  oligonucleotide probe

SEQ ID NO: 34695 - DNA, 32 bp, Artificial; identical to SEQ ID NO: 5547
  oligonucleotide probe

SEQ ID NO: 34696 - DNA, 32 bp, Artificial; identical to SEQ ID NO: 5564
  oligonucleotide probe

SEQ ID NO: 34697 - DNA, 32 bp, Artificial; identical to SEQ ID NO: 5565
  oligonucleotide probe

SEQ ID NO: 34698 - DNA, 32 bp, Artificial; identical to SEQ ID NO: 5544
  oligonucleotide probe

SEQ ID NO: 34699 - DNA, 32 bp, Artificial; identical to SEQ ID NO: 5545
  oligonucleotide probe

SEQ ID NO: 34700 - DNA, 32 bp, Artificial; identical to SEQ ID NO: 5584
  oligonucleotide probe

SEQ ID NO: 34701 - DNA, 32 bp, Artificial; identical to SEQ ID NO: 5585
  oligonucleotide probe

SEQ ID NO: 34702 - DNA, 32 bp, Artificial; identical to SEQ ID NO: 5550
  oligonucleotide probe

SEQ ID NO: 34703 - DNA, 32 bp, Artificial; identical to SEQ ID NO: 5551
  oligonucleotide probe

SEQ ID NO: 34704 - DNA, 32 bp, Artificial; identical to SEQ ID NO: 5538
  oligonucleotide probe

SEQ ID NO: 34705 - DNA, 32 bp, Artificial; identical to SEQ ID NO: 5539
  oligonucleotide probe

SEQ ID NO: 34706 - DNA, 32 bp, Artificial; identical to SEQ ID NO: 5546
  oligonucleotide probe

SEQ ID NO: 34707 - DNA, 32 bp, Artificial; identical to SEQ ID NO: 5547
  oligonucleotide probe

SEQ ID NO: 34708 - DNA, 32 bp, Artificial; identical to SEQ ID NO: 5540
  oligonucleotide probe

SEQ ID NO: 34709 - DNA, 32 bp, Artificial; identical to SEQ ID NO: 5541
  oligonucleotide probe

SEQ ID NO: 34710 - DNA, 32 bp, Artificial; identical to SEQ ID NO: 5546
  oligonucleotide probe

SEQ ID NO: 34711 - DNA, 32 bp, Artificial; identical to SEQ ID NO: 5547
  oligonucleotide probe

SEQ ID NO: 34712 - DNA, 32 bp, Artificial; identical to SEQ ID NO: 5546
  oligonucleotide probe

SEQ ID NO: 34713 - DNA, 32 bp, Artificial; identical to SEQ ID NO: 5547
  oligonucleotide probe

SEQ ID NO: 34714 - DNA, 32 bp, Artificial; identical to SEQ ID NO: 5550
  oligonucleotide probe

SEQ ID NO: 34715 - DNA, 32 bp, Artificial; identical to SEQ ID NO: 5551
  oligonucleotide probe

SEQ ID NO: 34716 - DNA, 32 bp, Artificial; identical to SEQ ID NO: 5594
  oligonucleotide probe

SEQ ID NO: 34717 - DNA, 32 bp, Artificial; identical to SEQ ID NO: 5595
  oligonucleotide probe

SEQ ID NO: 34718 - DNA, 32 bp, Artificial; identical to SEQ ID NO: 5538
  oligonucleotide probe

SEQ ID NO: 34719 - DNA, 32 bp, Artificial; identical to SEQ ID NO: 5539
  oligonucleotide probe

SEQ ID NO: 34720 - DNA, 32 bp, Artificial; identical to SEQ ID NO: 5544
  oligonucleotide probe

SEQ ID NO: 34721 - DNA, 32 bp, Artificial; identical to SEQ ID NO: 5545
  oligonucleotide probe

SEQ ID NO: 34722 - DNA, 32 bp, Artificial; identical to SEQ ID NO: 5536
  oligonucleotide probe

SEQ ID NO: 34723 - DNA, 32 bp, Artificial; identical to SEQ ID NO: 5537
  oligonucleotide probe

SEQ ID NO: 34724 - DNA, 32 bp, Artificial; identical to SEQ ID NO: 5564
  oligonucleotide probe

SEQ ID NO: 34725 - DNA, 32 bp, Artificial; identical to SEQ ID NO: 5565
  oligonucleotide probe

SEQ ID NO: 34726 - DNA, 32 bp, Artificial; identical to SEQ ID NO: 5565
  oligonucleotide probe

SEQ ID NO: 34727 - DNA, 32 bp, Artificial; identical to SEQ ID NO: 5547
  oligonucleotide probe

SEQ ID NO: 34728 - DNA, 32 bp, Artificial; identical to SEQ ID NO: 5541
  oligonucleotide probe

SEQ ID NO: 34729 - DNA, 32 bp, Artificial; identical to SEQ ID NO: 5545
  oligonucleotide probe

SEQ ID NO: 34730 - DNA, 32 bp, Artificial; identical to SEQ ID NO: 5538
  oligonucleotide probe

SEQ ID NO: 34731 - DNA, 32 bp, Artificial; identical to SEQ ID NO: 5539
  oligonucleotide probe

SEQ ID NO: 34732 - DNA, 32 bp, Artificial; identical to SEQ ID NO: 5538
  oligonucleotide probe

SEQ ID NO: 34733 - DNA, 32 bp, Artificial; identical to SEQ ID NO: 5539
  oligonucleotide probe

SEQ ID NO: 34734 - DNA, 32 bp, Artificial; identical to SEQ ID NO: 5610
  oligonucleotide probe

SEQ ID NO: 34735 - DNA, 32 bp, Artificial; identical to SEQ ID NO: 5611
  oligonucleotide probe

SEQ ID NO: 34736 - DNA, 32 bp, Artificial; identical to SEQ ID NO: 5540
  oligonucleotide probe

SEQ ID NO: 34737 - DNA, 32 bp, Artificial; identical to SEQ ID NO: 5541
  oligonucleotide probe

SEQ ID NO: 34738 - DNA, 32 bp, Artificial; identical to SEQ ID NO: 5708
  oligonucleotide probe

SEQ ID NO: 34739 - DNA, 32 bp, Artificial; identical to SEQ ID NO: 5709
  oligonucleotide probe

SEQ ID NO: 34740 - DNA, 32 bp, Artificial; identical to SEQ ID NO: 5540
  oligonucleotide probe

SEQ ID NO: 34741 - DNA, 32 bp, Artificial; identical to SEQ ID NO: 5541
  oligonucleotide probe

SEQ ID NO: 34742 - DNA, 32 bp, Artificial; identical to SEQ ID NO: 5541
  oligonucleotide probe

SEQ ID NO: 34743 - DNA, 32 bp, Artificial; identical to SEQ ID NO: 5545
  oligonucleotide probe

SEQ ID NO: 34744 - DNA, 32 bp, Artificial; identical to SEQ ID NO: 5708
  oligonucleotide probe

SEQ ID NO: 34745 - DNA, 32 bp, Artificial; identical to SEQ ID NO: 5709
  oligonucleotide probe

SEQ ID NO: 34746 - DNA, 32 bp, Artificial; identical to SEQ ID NO: 5564
  oligonucleotide probe

SEQ ID NO: 34747 - DNA, 32 bp, Artificial; identical to SEQ ID NO: 5565
  oligonucleotide probe

SEQ ID NO: 34748 - DNA, 32 bp, Artificial; identical to SEQ ID NO: 5544
  oligonucleotide probe

SEQ ID NO: 34749 - DNA, 32 bp, Artificial; identical to SEQ ID NO: 5545
  oligonucleotide probe

SEQ ID NO: 34750 - DNA, 32 bp, Artificial; identical to SEQ ID NO: 5584
  oligonucleotide probe

SEQ ID NO: 34751 - DNA, 32 bp, Artificial; identical to SEQ ID NO: 5585
  oligonucleotide probe

SEQ ID NO: 34752 - DNA, 32 bp, Artificial; identical to SEQ ID NO: 5550
  oligonucleotide probe

SEQ ID NO: 34753 - DNA, 32 bp, Artificial; identical to SEQ ID NO: 5551
  oligonucleotide probe

SEQ ID NO: 34754 - DNA, 32 bp, Artificial; identical to SEQ ID NO: 5546
  oligonucleotide probe

SEQ ID NO: 34755 - DNA, 32 bp, Artificial; identical to SEQ ID NO: 5547
  oligonucleotide probe

SEQ ID NO: 34756 - DNA, 32 bp, Artificial; identical to SEQ ID NO: 5546
  oligonucleotide probe

SEQ ID NO: 34757 - DNA, 32 bp, Artificial; identical to SEQ ID NO: 5547
  oligonucleotide probe

SEQ ID NO: 34758 - DNA, 32 bp, Artificial; identical to SEQ ID NO: 5544
  oligonucleotide probe

SEQ ID NO: 34759 - DNA, 32 bp, Artificial; identical to SEQ ID NO: 5545
  oligonucleotide probe

SEQ ID NO: 34760 - DNA, 32 bp, Artificial; identical to SEQ ID NO: 5536
  oligonucleotide probe

SEQ ID NO: 34761 - DNA, 32 bp, Artificial; identical to SEQ ID NO: 5537
  oligonucleotide probe

SEQ ID NO: 34762 - DNA, 32 bp, Artificial; identical to SEQ ID NO: 5538
  oligonucleotide probe

SEQ ID NO: 34763 - DNA, 32 bp, Artificial; identical to SEQ ID NO: 5539
  oligonucleotide probe

SEQ ID NO: 34764 - DNA, 32 bp, Artificial; identical to SEQ ID NO: 5564
  oligonucleotide probe

SEQ ID NO: 34765 - DNA, 32 bp, Artificial; identical to SEQ ID NO: 5565
  oligonucleotide probe

SEQ ID NO: 34766 - DNA, 32 bp, Artificial; identical to SEQ ID NO: 5538
  oligonucleotide probe

SEQ ID NO: 34767 - DNA, 32 bp, Artificial; identical to SEQ ID NO: 5539
  oligonucleotide probe

SEQ ID NO: 34768 - DNA, 32 bp, Artificial; identical to SEQ ID NO: 5536
  oligonucleotide probe

SEQ ID NO: 34769 - DNA, 32 bp, Artificial; identical to SEQ ID NO: 5537
  oligonucleotide probe

SEQ ID NO: 34770 - DNA, 32 bp, Artificial; identical to SEQ ID NO: 5538
  oligonucleotide probe

SEQ ID NO: 34771 - DNA, 32 bp, Artificial; identical to SEQ ID NO: 5539
  oligonucleotide probe

SEQ ID NO: 34772 - DNA, 32 bp, Artificial; identical to SEQ ID NO: 5544
  oligonucleotide probe

SEQ ID NO: 34773 - DNA, 32 bp, Artificial; identical to SEQ ID NO: 5545
  oligonucleotide probe

SEQ ID NO: 34774 - DNA, 32 bp, Artificial; identical to SEQ ID NO: 5540
  oligonucleotide probe

SEQ ID NO: 34775 - DNA, 32 bp, Artificial; identical to SEQ ID NO: 5541
  oligonucleotide probe

SEQ ID NO: 34776 - DNA, 32 bp, Artificial; identical to SEQ ID NO: 5536
  oligonucleotide probe

SEQ ID NO: 34777 - DNA, 32 bp, Artificial; identical to SEQ ID NO: 5537
  oligonucleotide probe

SEQ ID NO: 34778 - DNA, 32 bp, Artificial; identical to SEQ ID NO: 5540
  oligonucleotide probe

SEQ ID NO: 34779 - DNA, 32 bp, Artificial; identical to SEQ ID NO: 5541
  oligonucleotide probe

SEQ ID NO: 34780 - DNA, 32 bp, Artificial; identical to SEQ ID NO: 5564
  oligonucleotide probe

SEQ ID NO: 34781 - DNA, 32 bp, Artificial; identical to SEQ ID NO: 5565
  oligonucleotide probe

SEQ ID NO: 34782 - DNA, 32 bp, Artificial; identical to SEQ ID NO: 5538
  oligonucleotide probe

SEQ ID NO: 34783 - DNA, 32 bp, Artificial; identical to SEQ ID NO: 5539
  oligonucleotide probe

SEQ ID NO: 34784 - DNA, 32 bp, Artificial; identical to SEQ ID NO: 5544
  oligonucleotide probe

SEQ ID NO: 34785 - DNA, 32 bp, Artificial; identical to SEQ ID NO: 5545
  oligonucleotide probe

SEQ ID NO: 34786 - DNA, 32 bp, Artificial; identical to SEQ ID NO: 5546
  oligonucleotide probe

SEQ ID NO: 34787 - DNA, 32 bp, Artificial; identical to SEQ ID NO: 5547
  oligonucleotide probe

SEQ ID NO: 34788 - DNA, 32 bp, Artificial; identical to SEQ ID NO: 5584
  oligonucleotide probe

SEQ ID NO: 34789 - DNA, 32 bp, Artificial; identical to SEQ ID NO: 5585
  oligonucleotide probe

SEQ ID NO: 34790 - DNA, 32 bp, Artificial; identical to SEQ ID NO: 5546
  oligonucleotide probe

SEQ ID NO: 34791 - DNA, 32 bp, Artificial; identical to SEQ ID NO: 5547
  oligonucleotide probe

SEQ ID NO: 34792 - DNA, 32 bp, Artificial; identical to SEQ ID NO: 5544
  oligonucleotide probe

SEQ ID NO: 34793 - DNA, 32 bp, Artificial; identical to SEQ ID NO: 5545
  oligonucleotide probe

SEQ ID NO: 34794 - DNA, 32 bp, Artificial; identical to SEQ ID NO: 5584
  oligonucleotide probe

SEQ ID NO: 34795 - DNA, 32 bp, Artificial; identical to SEQ ID NO: 5585
  oligonucleotide probe

SEQ ID NO: 34796 - DNA, 32 bp, Artificial; identical to SEQ ID NO: 5564
  oligonucleotide probe

SEQ ID NO: 34797 - DNA, 32 bp, Artificial; identical to SEQ ID NO: 5565
  oligonucleotide probe

SEQ ID NO: 34798 - DNA, 32 bp, Artificial; identical to SEQ ID NO: 5594
  oligonucleotide probe

SEQ ID NO: 34799 - DNA, 32 bp, Artificial; identical to SEQ ID NO: 5595
  oligonucleotide probe

SEQ ID NO: 34800 - DNA, 32 bp, Artificial; identical to SEQ ID NO: 5536
  oligonucleotide probe

SEQ ID NO: 34801 - DNA, 32 bp, Artificial; identical to SEQ ID NO: 5537
  oligonucleotide probe

SEQ ID NO: 34802 - DNA, 32 bp, Artificial; identical to SEQ ID NO: 5564
  oligonucleotide probe

SEQ ID NO: 34803 - DNA, 32 bp, Artificial; identical to SEQ ID NO: 5565
  oligonucleotide probe

SEQ ID NO: 34804 - DNA, 32 bp, Artificial; identical to SEQ ID NO: 5564
  oligonucleotide probe

SEQ ID NO: 34805 - DNA, 32 bp, Artificial; identical to SEQ ID NO: 5565
  oligonucleotide probe

SEQ ID NO: 34806 - DNA, 32 bp, Artificial; identical to SEQ ID NO: 5546
  oligonucleotide probe

SEQ ID NO: 34807 - DNA, 32 bp, Artificial; identical to SEQ ID NO: 5547
  oligonucleotide probe

SEQ ID NO: 34808 - DNA, 32 bp, Artificial; identical to SEQ ID NO: 5708
  oligonucleotide probe

SEQ ID NO: 34809 - DNA, 32 bp, Artificial; identical to SEQ ID NO: 5709
  oligonucleotide probe

SEQ ID NO: 34810 - DNA, 32 bp, Artificial; identical to SEQ ID NO: 5536
  oligonucleotide probe

SEQ ID NO: 34811 - DNA, 32 bp, Artificial; identical to SEQ ID NO: 5537
  oligonucleotide probe

SEQ ID NO: 34812 - DNA, 32 bp, Artificial; identical to SEQ ID NO: 5544
  oligonucleotide probe

SEQ ID NO: 34813 - DNA, 32 bp, Artificial; identical to SEQ ID NO: 5545
  oligonucleotide probe

SEQ ID NO: 34814 - DNA, 32 bp, Artificial; identical to SEQ ID NO: 5536
  oligonucleotide probe

SEQ ID NO: 34815 - DNA, 32 bp, Artificial; identical to SEQ ID NO: 5537
  oligonucleotide probe

SEQ ID NO: 34816 - DNA, 32 bp, Artificial; identical to SEQ ID NO: 5540
  oligonucleotide probe

SEQ ID NO: 34817 - DNA, 32 bp, Artificial; identical to SEQ ID NO: 5541
  oligonucleotide probe

SEQ ID NO: 34818 - DNA, 32 bp, Artificial; identical to SEQ ID NO: 5536
  oligonucleotide probe

SEQ ID NO: 34819 - DNA, 32 bp, Artificial; identical to SEQ ID NO: 5537
  oligonucleotide probe

SEQ ID NO: 34820 - DNA, 32 bp, Artificial; identical to SEQ ID NO: 5538
  oligonucleotide probe

SEQ ID NO: 34821 - DNA, 32 bp, Artificial; identical to SEQ ID NO: 5539
  oligonucleotide probe

SEQ ID NO: 34822 - DNA, 32 bp, Artificial; identical to SEQ ID NO: 5538
  oligonucleotide probe

SEQ ID NO: 34823 - DNA, 32 bp, Artificial; identical to SEQ ID NO: 5539
  oligonucleotide probe

SEQ ID NO: 34824 - DNA, 32 bp, Artificial; identical to SEQ ID NO: 5546
  oligonucleotide probe

SEQ ID NO: 34825 - DNA, 32 bp, Artificial; identical to SEQ ID NO: 5547
  oligonucleotide probe

SEQ ID NO: 34826 - DNA, 32 bp, Artificial; identical to SEQ ID NO: 5546
  oligonucleotide probe

SEQ ID NO: 34827 - DNA, 32 bp, Artificial; identical to SEQ ID NO: 5547
  oligonucleotide probe

SEQ ID NO: 34828 - DNA, 32 bp, Artificial; identical to SEQ ID NO: 5544
  oligonucleotide probe

SEQ ID NO: 34829 - DNA, 32 bp, Artificial; identical to SEQ ID NO: 5545
  oligonucleotide probe

SEQ ID NO: 34830 - DNA, 32 bp, Artificial; identical to SEQ ID NO: 5546
  oligonucleotide probe

SEQ ID NO: 34831 - DNA, 32 bp, Artificial; identical to SEQ ID NO: 5547
  oligonucleotide probe

SEQ ID NO: 34832 - DNA, 32 bp, Artificial; identical to SEQ ID NO: 5536
  oligonucleotide probe

SEQ ID NO: 34833 - DNA, 32 bp, Artificial; identical to SEQ ID NO: 5537
  oligonucleotide probe

SEQ ID NO: 34834 - DNA, 32 bp, Artificial; identical to SEQ ID NO: 5564
  oligonucleotide probe

SEQ ID NO: 34835 - DNA, 32 bp, Artificial; identical to SEQ ID NO: 5565
  oligonucleotide probe

SEQ ID NO: 34836 - DNA, 32 bp, Artificial; identical to SEQ ID NO: 5540
  oligonucleotide probe

SEQ ID NO: 34837 - DNA, 32 bp, Artificial; identical to SEQ ID NO: 5541
  oligonucleotide probe

SEQ ID NO: 34838 - DNA, 32 bp, Artificial; identical to SEQ ID NO: 5544
  oligonucleotide probe

SEQ ID NO: 34839 - DNA, 32 bp, Artificial; identical to SEQ ID NO: 5545
  oligonucleotide probe

SEQ ID NO: 34840 - DNA, 32 bp, Artificial; identical to SEQ ID NO: 5538
  oligonucleotide probe

SEQ ID NO: 34841 - DNA, 32 bp, Artificial; identical to SEQ ID NO: 5539
  oligonucleotide probe

SEQ ID NO: 34842 - DNA, 32 bp, Artificial; identical to SEQ ID NO: 5536
  oligonucleotide probe

SEQ ID NO: 34843 - DNA, 32 bp, Artificial; identical to SEQ ID NO: 5537
  oligonucleotide probe

SEQ ID NO: 34844 - DNA, 32 bp, Artificial; identical to SEQ ID NO: 5584
  oligonucleotide probe

SEQ ID NO: 34845 - DNA, 32 bp, Artificial; identical to SEQ ID NO: 5585
  oligonucleotide probe

SEQ ID NO: 34846 - DNA, 32 bp, Artificial; identical to SEQ ID NO: 5546
  oligonucleotide probe

SEQ ID NO: 34847 - DNA, 32 bp, Artificial; identical to SEQ ID NO: 5547
  oligonucleotide probe

SEQ ID NO: 34848 - DNA, 32 bp, Artificial; identical to SEQ ID NO: 5546
  oligonucleotide probe

SEQ ID NO: 34849 - DNA, 32 bp, Artificial; identical to SEQ ID NO: 5547
  oligonucleotide probe

SEQ ID NO: 34850 - DNA, 32 bp, Artificial; identical to SEQ ID NO: 5536
  oligonucleotide probe

SEQ ID NO: 34851 - DNA, 32 bp, Artificial; identical to SEQ ID NO: 5537
  oligonucleotide probe

SEQ ID NO: 34852 - DNA, 32 bp, Artificial; identical to SEQ ID NO: 5554
  oligonucleotide probe

SEQ ID NO: 34853 - DNA, 32 bp, Artificial; identical to SEQ ID NO: 5555
  oligonucleotide probe

SEQ ID NO: 34854 - DNA, 32 bp, Artificial; identical to SEQ ID NO: 5594
  oligonucleotide probe

SEQ ID NO: 34855 - DNA, 32 bp, Artificial; identical to SEQ ID NO: 5595
  oligonucleotide probe

SEQ ID NO: 34856 - DNA, 32 bp, Artificial; identical to SEQ ID NO: 5564
  oligonucleotide probe

SEQ ID NO: 34857 - DNA, 32 bp, Artificial; identical to SEQ ID NO: 5565
  oligonucleotide probe

SEQ ID NO: 34858 - DNA, 32 bp, Artificial; identical to SEQ ID NO: 5536
  oligonucleotide probe

SEQ ID NO: 34859 - DNA, 32 bp, Artificial; identical to SEQ ID NO: 5537
  oligonucleotide probe

SEQ ID NO: 34860 - DNA, 32 bp, Artificial; identical to SEQ ID NO: 5546
  oligonucleotide probe

SEQ ID NO: 34861 - DNA, 32 bp, Artificial; identical to SEQ ID NO: 5547
  oligonucleotide probe

SEQ ID NO: 34862 - DNA, 32 bp, Artificial; identical to SEQ ID NO: 5554
  oligonucleotide probe

SEQ ID NO: 34863 - DNA, 32 bp, Artificial; identical to SEQ ID NO: 5555
  oligonucleotide probe

SEQ ID NO: 34864 - DNA, 32 bp, Artificial; identical to SEQ ID NO: 5540
  oligonucleotide probe

SEQ ID NO: 34865 - DNA, 32 bp, Artificial; identical to SEQ ID NO: 5541
  oligonucleotide probe

SEQ ID NO: 34866 - DNA, 32 bp, Artificial; identical to SEQ ID NO: 5544
  oligonucleotide probe

SEQ ID NO: 34867 - DNA, 32 bp, Artificial; identical to SEQ ID NO: 5545
  oligonucleotide probe

SEQ ID NO: 34868 - DNA, 32 bp, Artificial; identical to SEQ ID NO: 5536
  oligonucleotide probe

SEQ ID NO: 34869 - DNA, 32 bp, Artificial; identical to SEQ ID NO: 5537
  oligonucleotide probe

SEQ ID NO: 34870 - DNA, 32 bp, Artificial; identical to SEQ ID NO: 5536
  oligonucleotide probe

SEQ ID NO: 34871 - DNA, 32 bp, Artificial; identical to SEQ ID NO: 5537
  oligonucleotide probe

SEQ ID NO: 34872 - DNA, 32 bp, Artificial; identical to SEQ ID NO: 5584
  oligonucleotide probe

SEQ ID NO: 34873 - DNA, 32 bp, Artificial; identical to SEQ ID NO: 5585
  oligonucleotide probe

SEQ ID NO: 34874 - DNA, 32 bp, Artificial; identical to SEQ ID NO: 5538
  oligonucleotide probe

SEQ ID NO: 34875 - DNA, 32 bp, Artificial; identical to SEQ ID NO: 5539
  oligonucleotide probe

SEQ ID NO: 34876 - DNA, 32 bp, Artificial; identical to SEQ ID NO: 5546
  oligonucleotide probe

SEQ ID NO: 34877 - DNA, 32 bp, Artificial; identical to SEQ ID NO: 5547
  oligonucleotide probe

SEQ ID NO: 34878 - DNA, 32 bp, Artificial; identical to SEQ ID NO: 5544
  oligonucleotide probe

SEQ ID NO: 34879 - DNA, 32 bp, Artificial; identical to SEQ ID NO: 5545
  oligonucleotide probe

SEQ ID NO: 34880 - DNA, 32 bp, Artificial; identical to SEQ ID NO: 5536
  oligonucleotide probe

SEQ ID NO: 34881 - DNA, 32 bp, Artificial; identical to SEQ ID NO: 5537
  oligonucleotide probe

SEQ ID NO: 34882 - DNA, 32 bp, Artificial; identical to SEQ ID NO: 5554
  oligonucleotide probe

SEQ ID NO: 34883 - DNA, 32 bp, Artificial; identical to SEQ ID NO: 5555
  oligonucleotide probe

SEQ ID NO: 34884 - DNA, 32 bp, Artificial; identical to SEQ ID NO: 5584
  oligonucleotide probe

SEQ ID NO: 34885 - DNA, 32 bp, Artificial; identical to SEQ ID NO: 5585
  oligonucleotide probe

SEQ ID NO: 34886 - DNA, 32 bp, Artificial; identical to SEQ ID NO: 5610
  oligonucleotide probe

SEQ ID NO: 34887 - DNA, 32 bp, Artificial; identical to SEQ ID NO: 5611
  oligonucleotide probe

SEQ ID NO: 34888 - DNA, 32 bp, Artificial; identical to SEQ ID NO: 5594
  oligonucleotide probe

SEQ ID NO: 34889 - DNA, 32 bp, Artificial; identical to SEQ ID NO: 5595
  oligonucleotide probe

SEQ ID NO: 34890 - DNA, 32 bp, Artificial; identical to SEQ ID NO: 5550
  oligonucleotide probe

SEQ ID NO: 34891 - DNA, 32 bp, Artificial; identical to SEQ ID NO: 5551
  oligonucleotide probe

SEQ ID NO: 34892 - DNA, 32 bp, Artificial; identical to SEQ ID NO: 5536
  oligonucleotide probe

SEQ ID NO: 34893 - DNA, 32 bp, Artificial; identical to SEQ ID NO: 5537
  oligonucleotide probe

SEQ ID NO: 34894 - DNA, 32 bp, Artificial; identical to SEQ ID NO: 5541
  oligonucleotide probe

SEQ ID NO: 34895 - DNA, 32 bp, Artificial; identical to SEQ ID NO: 5545
  oligonucleotide probe

SEQ ID NO: 34896 - DNA, 32 bp, Artificial; identical to SEQ ID NO: 5538
  oligonucleotide probe

SEQ ID NO: 34897 - DNA, 32 bp, Artificial; identical to SEQ ID NO: 5539
  oligonucleotide probe

SEQ ID NO: 34898 - DNA, 32 bp, Artificial; identical to SEQ ID NO: 5536
  oligonucleotide probe

SEQ ID NO: 34899 - DNA, 32 bp, Artificial; identical to SEQ ID NO: 5537
  oligonucleotide probe

SEQ ID NO: 34900 - DNA, 32 bp, Artificial; identical to SEQ ID NO: 6070
  oligonucleotide probe

SEQ ID NO: 34901 - DNA, 32 bp, Artificial; identical to SEQ ID NO: 5611
  oligonucleotide probe

SEQ ID NO: 34902 - DNA, 32 bp, Artificial; identical to SEQ ID NO: 5709
  oligonucleotide probe

SEQ ID NO: 34903 - DNA, 32 bp, Artificial; identical to SEQ ID NO: 5555
  oligonucleotide probe

SEQ ID NO: 34904 - DNA, 32 bp, Artificial; identical to SEQ ID NO: 6074
  oligonucleotide probe

SEQ ID NO: 34905 - DNA, 32 bp, Artificial; identical to SEQ ID NO: 5555
  oligonucleotide probe

SEQ ID NO: 34906 - DNA, 32 bp, Artificial; identical to SEQ ID NO: 5539
  oligonucleotide probe

SEQ ID NO: 34907 - DNA, 32 bp, Artificial; identical to SEQ ID NO: 5565
  oligonucleotide probe

SEQ ID NO: 34908 - DNA, 32 bp, Artificial; identical to SEQ ID NO: 5585
  oligonucleotide probe

SEQ ID NO: 34909 - DNA, 32 bp, Artificial; identical to SEQ ID NO: 5539
  oligonucleotide probe

SEQ ID NO: 34910 - DNA, 32 bp, Artificial; identical to SEQ ID NO: 5611
  oligonucleotide probe

SEQ ID NO: 34911 - DNA, 32 bp, Artificial; identical to SEQ ID NO: 5595
  oligonucleotide probe

SEQ ID NO: 34912 - DNA, 32 bp, Artificial; identical to SEQ ID NO: 5555
  oligonucleotide probe

SEQ ID NO: 34913 - DNA, 32 bp, Artificial; identical to SEQ ID NO: 5551
  oligonucleotide probe

SEQ ID NO: 34914 - DNA, 32 bp, Artificial; identical to SEQ ID NO: 5585
  oligonucleotide probe

SEQ ID NO: 34915 - DNA, 32 bp, Artificial; identical to SEQ ID NO: 5539
  oligonucleotide probe

SEQ ID NO: 34916 - DNA, 32 bp, Artificial; identical to SEQ ID NO: 5595
  oligonucleotide probe

SEQ ID NO: 34917 - DNA, 32 bp, Artificial; identical to SEQ ID NO: 5585
  oligonucleotide probe

SEQ ID NO: 34918 - DNA, 32 bp, Artificial; identical to SEQ ID NO: 5595
  oligonucleotide probe

SEQ ID NO: 34919 - DNA, 32 bp, Artificial; identical to SEQ ID NO: 5585
  oligonucleotide probe

SEQ ID NO: 34920 - DNA, 32 bp, Artificial; identical to SEQ ID NO: 5611
  oligonucleotide probe

SEQ ID NO: 34921 - DNA, 32 bp, Artificial; identical to SEQ ID NO: 5585
  oligonucleotide probe

SEQ ID NO: 34922 - DNA, 32 bp, Artificial; identical to SEQ ID NO: 5547
  oligonucleotide probe

SEQ ID NO: 34923 - DNA, 32 bp, Artificial; identical to SEQ ID NO: 5545
  oligonucleotide probe

SEQ ID NO: 34924 - DNA, 32 bp, Artificial; identical to SEQ ID NO: 5537
  oligonucleotide probe

SEQ ID NO: 34925 - DNA, 32 bp, Artificial; identical to SEQ ID NO: 5554
  oligonucleotide probe

SEQ ID NO: 34926 - DNA, 32 bp, Artificial; identical to SEQ ID NO: 5550
  oligonucleotide probe

SEQ ID NO: 34927 - DNA, 32 bp, Artificial; identical to SEQ ID NO: 5565
  oligonucleotide probe

SEQ ID NO: 34928 - DNA, 32 bp, Artificial; identical to SEQ ID NO: 5547
  oligonucleotide probe

SEQ ID NO: 34929 - DNA, 32 bp, Artificial; identical to SEQ ID NO: 5610
  oligonucleotide probe

SEQ ID NO: 34930 - DNA, 32 bp, Artificial; identical to SEQ ID NO: 5611
  oligonucleotide probe

SEQ ID NO: 34931 - DNA, 32 bp, Artificial; identical to SEQ ID NO: 5239
  oligonucleotide probe

SEQ ID NO: 34932 - DNA, 32 bp, Artificial; identical to SEQ ID NO: 5231
  oligonucleotide probe

SEQ ID NO: 34933 - DNA, 32 bp, Artificial; identical to SEQ ID NO: 5595
  oligonucleotide probe

SEQ ID NO: 34934 - DNA, 32 bp, Artificial; identical to SEQ ID NO: 5585
  oligonucleotide probe

SEQ ID NO: 34935 - DNA, 32 bp, Artificial; identical to SEQ ID NO: 5554
  oligonucleotide probe

SEQ ID NO: 34936 - DNA, 32 bp, Artificial; identical to SEQ ID NO: 5555
  oligonucleotide probe

SEQ ID NO: 34937 - DNA, 32 bp, Artificial; identical to SEQ ID NO: 5585
  oligonucleotide probe

SEQ ID NO: 34938 - DNA, 32 bp, Artificial; identical to SEQ ID NO: 5161
  oligonucleotide probe

SEQ ID NO: 34939 - DNA, 32 bp, Artificial; identical to SEQ ID NO: 5540
  oligonucleotide probe

SEQ ID NO: 34940 - DNA, 32 bp, Artificial; identical to SEQ ID NO: 5544
  oligonucleotide probe

SEQ ID NO: 34941 - DNA, 32 bp, Artificial; identical to SEQ ID NO: 5538
  oligonucleotide probe

SEQ ID NO: 34942 - DNA, 32 bp, Artificial; identical to SEQ ID NO: 5539
  oligonucleotide probe

SEQ ID NO: 34943 - DNA, 32 bp, Artificial; identical to SEQ ID NO: 5541
  oligonucleotide probe

SEQ ID NO: 34944 - DNA, 32 bp, Artificial; identical to SEQ ID NO: 5416
  oligonucleotide probe

SEQ ID NO: 34945 - DNA, 32 bp, Artificial; identical to SEQ ID NO: 5224
  oligonucleotide probe

SEQ ID NO: 34946 - DNA, 32 bp, Artificial; identical to SEQ ID NO: 5220
  oligonucleotide probe

SEQ ID NO: 34947 - DNA, 32 bp, Artificial; identical to SEQ ID NO: 5611
  oligonucleotide probe

SEQ ID NO: 34948 - DNA, 32 bp, Artificial; identical to SEQ ID NO: 5195
  oligonucleotide probe

SEQ ID NO: 34949 - DNA, 32 bp, Artificial; identical to SEQ ID NO: 5222
  oligonucleotide probe

SEQ ID NO: 34950 - DNA, 32 bp, Artificial; identical to SEQ ID NO: 5219
  oligonucleotide probe

SEQ ID NO: 34951 - DNA, 32 bp, Artificial; identical to SEQ ID NO: 5545
  oligonucleotide probe

SEQ ID NO: 34952 - DNA, 32 bp, Artificial; identical to SEQ ID NO: 5536
  oligonucleotide probe

SEQ ID NO: 34953 - DNA, 32 bp, Artificial; identical to SEQ ID NO: 5539
  oligonucleotide probe

SEQ ID NO: 34954 - DNA, 32 bp, Artificial; identical to SEQ ID NO: 5565
  oligonucleotide probe

SEQ ID NO: 34955 - DNA, 32 bp, Artificial; identical to SEQ ID NO: 5410
  oligonucleotide probe

SEQ ID NO: 34956 - DNA, 32 bp, Artificial; identical to SEQ ID NO: 5241
  oligonucleotide probe

SEQ ID NO: 34957 - DNA, 32 bp, Artificial; identical to SEQ ID NO: 5231
  oligonucleotide probe

SEQ ID NO: 34958 - DNA, 32 bp, Artificial; identical to SEQ ID NO: 5217
  oligonucleotide probe

SEQ ID NO: 34959 - DNA, 32 bp, Artificial; identical to SEQ ID NO: 5564
  oligonucleotide probe

SEQ ID NO: 34960 - DNA, 32 bp, Artificial; identical to SEQ ID NO: 5546
  oligonucleotide probe

SEQ ID NO: 34961 - DNA, 32 bp, Artificial; identical to SEQ ID NO: 6131
  oligonucleotide probe

SEQ ID NO: 34962 - DNA, 32 bp, Artificial; identical to SEQ ID NO: 6074
  oligonucleotide probe

SEQ ID NO: 34963 - DNA, 32 bp, Artificial; identical to SEQ ID NO: 5564
  oligonucleotide probe

SEQ ID NO: 34964 - DNA, 32 bp, Artificial; identical to SEQ ID NO: 5546
  oligonucleotide probe

SEQ ID NO: 34965 - DNA, 32 bp, Artificial; identical to SEQ ID NO: 5594
  oligonucleotide probe

SEQ ID NO: 34966 - DNA, 32 bp, Artificial; identical to SEQ ID NO: 5595
  oligonucleotide probe

SEQ ID NO: 34967 - DNA, 32 bp, Artificial; identical to SEQ ID NO: 5708
  oligonucleotide probe

SEQ ID NO: 34968 - DNA, 32 bp, Artificial; identical to SEQ ID NO: 5709
  oligonucleotide probe

SEQ ID NO: 34969 - DNA, 32 bp, Artificial; identical to SEQ ID NO: 5141
  oligonucleotide probe

SEQ ID NO: 34970 - DNA, 32 bp, Artificial; identical to SEQ ID NO: 5133
  oligonucleotide probe

SEQ ID NO: 34971 - DNA, 32 bp, Artificial; identical to SEQ ID NO: 5564
  oligonucleotide probe

SEQ ID NO: 34972 - DNA, 32 bp, Artificial; identical to SEQ ID NO: 5546
  oligonucleotide probe

SEQ ID NO: 34973 - DNA, 32 bp, Artificial; identical to SEQ ID NO: 5584
  oligonucleotide probe

SEQ ID NO: 34974 - DNA, 32 bp, Artificial; identical to SEQ ID NO: 5538
  oligonucleotide probe

SEQ ID NO: 34975 - DNA, 32 bp, Artificial; identical to SEQ ID NO: 6145
  oligonucleotide probe

SEQ ID NO: 34976 - DNA, 32 bp, Artificial; identical to SEQ ID NO: 6070
  oligonucleotide probe

SEQ ID NO: 34977 - DNA, 32 bp, Artificial; identical to SEQ ID NO: 5551
  oligonucleotide probe

SEQ ID NO: 34978 - DNA, 32 bp, Artificial; identical to SEQ ID NO: 5160
  oligonucleotide probe

SEQ ID NO: 34979 - DNA, 32 bp, Artificial; identical to SEQ ID NO: 5538
  oligonucleotide probe

SEQ ID NO: 34980 - DNA, 32 bp, Artificial; identical to SEQ ID NO: 5564
  oligonucleotide probe

SEQ ID NO: 34981 - DNA, 32 bp, Artificial; identical to SEQ ID NO: 5240
  oligonucleotide probe

SEQ ID NO: 34982 - DNA, 32 bp, Artificial; identical to SEQ ID NO: 5232
  oligonucleotide probe

SEQ ID NO: 34983 - DNA, 32 bp, Artificial; identical to SEQ ID NO: 5547
  oligonucleotide probe

SEQ ID NO: 34984 - DNA, 32 bp, Artificial; identical to SEQ ID NO: 5537
  oligonucleotide probe

SEQ ID NO: 34985 - DNA, 32 bp, Artificial; identical to SEQ ID NO: 5551
  oligonucleotide probe

SEQ ID NO: 34986 - DNA, 32 bp, Artificial; identical to SEQ ID NO: 5541
  oligonucleotide probe

SEQ ID NO: 34987 - DNA, 32 bp, Artificial; identical to SEQ ID NO: 6074
  oligonucleotide probe

SEQ ID NO: 34988 - DNA, 32 bp, Artificial; identical to SEQ ID NO: 5709
  oligonucleotide probe

SEQ ID NO: 34989 - DNA, 32 bp, Artificial; identical to SEQ ID NO: 5584
  oligonucleotide probe

SEQ ID NO: 34990 - DNA, 32 bp, Artificial; identical to SEQ ID NO: 5585
  oligonucleotide probe

SEQ ID NO: 34991 - DNA, 32 bp, Artificial; identical to SEQ ID NO: 5229
  oligonucleotide probe

SEQ ID NO: 34992 - DNA, 32 bp, Artificial; identical to SEQ ID NO: 5253
  oligonucleotide probe

SEQ ID NO: 34993 - DNA, 32 bp, Artificial; identical to SEQ ID NO: 5218
  oligonucleotide probe

SEQ ID NO: 34994 - DNA, 32 bp, Artificial; identical to SEQ ID NO: 5224
  oligonucleotide probe

SEQ ID NO: 34995 - DNA, 32 bp, Artificial; identical to SEQ ID NO: 6145
  oligonucleotide probe

SEQ ID NO: 34996 - DNA, 32 bp, Artificial; identical to SEQ ID NO: 6070
  oligonucleotide probe

SEQ ID NO: 34997 - DNA, 32 bp, Artificial; identical to SEQ ID NO: 5138
  oligonucleotide probe

SEQ ID NO: 34998 - DNA, 32 bp, Artificial; identical to SEQ ID NO: 5135
  oligonucleotide probe

SEQ ID NO: 34999 - DNA, 32 bp, Artificial; identical to SEQ ID NO: 5185
  oligonucleotide probe

SEQ ID NO: 35000 - DNA, 32 bp, Artificial; identical to SEQ ID NO: 5163
  oligonucleotide probe

SEQ ID NO: 35001 - DNA, 32 bp, Artificial; identical to SEQ ID NO: 5545
  oligonucleotide probe

SEQ ID NO: 35002 - DNA, 32 bp, Artificial; identical to SEQ ID NO: 5399
  oligonucleotide probe

SEQ ID NO: 35003 - DNA, 32 bp, Artificial; identical to SEQ ID NO: 5610
  oligonucleotide probe

SEQ ID NO: 35004 - DNA, 32 bp, Artificial; identical to SEQ ID NO: 5611
  oligonucleotide probe

SEQ ID NO: 35005 - DNA, 32 bp, Artificial; identical to SEQ ID NO: 5541
  oligonucleotide probe

SEQ ID NO: 35006 - DNA, 32 bp, Artificial; identical to SEQ ID NO: 5545
  oligonucleotide probe

SEQ ID NO: 35007 - DNA, 32 bp, Artificial; identical to SEQ ID NO: 5594
  oligonucleotide probe

SEQ ID NO: 35008 - DNA, 32 bp, Artificial; identical to SEQ ID NO: 5595
  oligonucleotide probe

SEQ ID NO: 35009 - DNA, 32 bp, Artificial; identical to SEQ ID NO: 6145
  oligonucleotide probe

SEQ ID NO: 35010 - DNA, 32 bp, Artificial; identical to SEQ ID NO: 6070
  oligonucleotide probe

SEQ ID NO: 35011 - DNA, 32 bp, Artificial; identical to SEQ ID NO: 5538
  oligonucleotide probe

SEQ ID NO: 35012 - DNA, 32 bp, Artificial; identical to SEQ ID NO: 5564
  oligonucleotide probe

SEQ ID NO: 35013 - DNA, 32 bp, Artificial; identical to SEQ ID NO: 5177
  oligonucleotide probe

SEQ ID NO: 35014 - DNA, 32 bp, Artificial; identical to SEQ ID NO: 5137
  oligonucleotide probe

SEQ ID NO: 35015 - DNA, 32 bp, Artificial; identical to SEQ ID NO: 5550
  oligonucleotide probe

SEQ ID NO: 35016 - DNA, 32 bp, Artificial; identical to SEQ ID NO: 5551
  oligonucleotide probe

SEQ ID NO: 35017 - DNA, 32 bp, Artificial; identical to SEQ ID NO: 5708
  oligonucleotide probe

SEQ ID NO: 35018 - DNA, 32 bp, Artificial; identical to SEQ ID NO: 5709
  oligonucleotide probe

SEQ ID NO: 35019 - DNA, 32 bp, Artificial; identical to SEQ ID NO: 5585
  oligonucleotide probe

SEQ ID NO: 35020 - DNA, 32 bp, Artificial; identical to SEQ ID NO: 5539
  oligonucleotide probe

SEQ ID NO: 35021 - DNA, 32 bp, Artificial; identical to SEQ ID NO: 5547
  oligonucleotide probe

SEQ ID NO: 35022 - DNA, 32 bp, Artificial; identical to SEQ ID NO: 5537
  oligonucleotide probe

SEQ ID NO: 35023 - DNA, 32 bp, Artificial; identical to SEQ ID NO: 6131
  oligonucleotide probe

SEQ ID NO: 35024 - DNA, 32 bp, Artificial; identical to SEQ ID NO: 6074
  oligonucleotide probe

SEQ ID NO: 35025 - DNA, 32 bp, Artificial; identical to SEQ ID NO: 5554
  oligonucleotide probe

SEQ ID NO: 35026 - DNA, 32 bp, Artificial; identical to SEQ ID NO: 5555
  oligonucleotide probe

SEQ ID NO: 35027 - DNA, 32 bp, Artificial; identical to SEQ ID NO: 5547
  oligonucleotide probe

SEQ ID NO: 35028 - DNA, 32 bp, Artificial; identical to SEQ ID NO: 6131
  oligonucleotide probe

SEQ ID NO: 35029 - DNA, 32 bp, Artificial; identical to SEQ ID NO: 5565
  oligonucleotide probe

SEQ ID NO: 35030 - DNA, 32 bp, Artificial; identical to SEQ ID NO: 5547
  oligonucleotide probe

SEQ ID NO: 35031 - DNA, 32 bp, Artificial; identical to SEQ ID NO: 5541
  oligonucleotide probe

SEQ ID NO: 35032 - DNA, 32 bp, Artificial; identical to SEQ ID NO: 5545
  oligonucleotide probe

SEQ ID NO: 35033 - DNA, 32 bp, Artificial; identical to SEQ ID NO: 6131
  oligonucleotide probe

SEQ ID NO: 35034 - DNA, 32 bp, Artificial; identical to SEQ ID NO: 5708
  oligonucleotide probe

SEQ ID NO: 35035 - DNA, 32 bp, Artificial; identical to SEQ ID NO: 5565
  oligonucleotide probe

SEQ ID NO: 35036 - DNA, 32 bp, Artificial; identical to SEQ ID NO: 5547
  oligonucleotide probe

SEQ ID NO: 35037 - DNA, 32 bp, Artificial; identical to SEQ ID NO: 5540
  oligonucleotide probe

SEQ ID NO: 35038 - DNA, 32 bp, Artificial; identical to SEQ ID NO: 5544
  oligonucleotide probe

SEQ ID NO: 35039 - DNA, 32 bp, Artificial; identical to SEQ ID NO: 5708
  oligonucleotide probe

SEQ ID NO: 35040 - DNA, 32 bp, Artificial; identical to SEQ ID NO: 5554
  oligonucleotide probe

SEQ ID NO: 35041 - DNA, 32 bp, Artificial; identical to SEQ ID NO: 5565
  oligonucleotide probe

SEQ ID NO: 35042 - DNA, 32 bp, Artificial; identical to SEQ ID NO: 5411
  oligonucleotide probe

SEQ ID NO: 35043 - DNA, 32 bp, Artificial; identical to SEQ ID NO: 6074
  oligonucleotide probe

SEQ ID NO: 35044 - DNA, 32 bp, Artificial; identical to SEQ ID NO: 5171
  oligonucleotide probe

SEQ ID NO: 35045 - DNA, 32 bp, Artificial; identical to SEQ ID NO: 5708
  oligonucleotide probe

SEQ ID NO: 35046 - DNA, 32 bp, Artificial; identical to SEQ ID NO: 5554
  oligonucleotide probe

SEQ ID NO: 35047 - DNA, 32 bp, Artificial; identical to SEQ ID NO: 5595
  oligonucleotide probe

SEQ ID NO: 35048 - DNA, 32 bp, Artificial; identical to SEQ ID NO: 5177
  oligonucleotide probe

SEQ ID NO: 35049 - DNA, 32 bp, Artificial; identical to SEQ ID NO: 6131
  oligonucleotide probe

SEQ ID NO: 35050 - DNA, 32 bp, Artificial; identical to SEQ ID NO: 6074
  oligonucleotide probe

SEQ ID NO: 35051 - DNA, 32 bp, Artificial; identical to SEQ ID NO: 5159
  oligonucleotide probe

SEQ ID NO: 35052 - DNA, 32 bp, Artificial; identical to SEQ ID NO: 5141
  oligonucleotide probe

SEQ ID NO: 35053 - DNA, 32 bp, Artificial; identical to SEQ ID NO: 6145
  oligonucleotide probe

SEQ ID NO: 35054 - DNA, 32 bp, Artificial; identical to SEQ ID NO: 6070
  oligonucleotide probe

SEQ ID NO: 35055 - DNA, 32 bp, Artificial; identical to SEQ ID NO: 5134
  oligonucleotide probe

SEQ ID NO: 35056 - DNA, 32 bp, Artificial; identical to SEQ ID NO: 5136
  oligonucleotide probe

SEQ ID NO: 35057 - DNA, 32 bp, Artificial; identical to SEQ ID NO: 5538
  oligonucleotide probe

SEQ ID NO: 35058 - DNA, 32 bp, Artificial; identical to SEQ ID NO: 5564
  oligonucleotide probe

SEQ ID NO: 35059 - DNA, 32 bp, Artificial; identical to SEQ ID NO: 5709
  oligonucleotide probe

SEQ ID NO: 35060 - DNA, 32 bp, Artificial; identical to SEQ ID NO: 5185
  oligonucleotide probe

SEQ ID NO: 35061 - DNA, 32 bp, Artificial; identical to SEQ ID NO: 5584
  oligonucleotide probe

SEQ ID NO: 35062 - DNA, 32 bp, Artificial; identical to SEQ ID NO: 5538
  oligonucleotide probe

SEQ ID NO: 35063 - DNA, 32 bp, Artificial; identical to SEQ ID NO: 5611
  oligonucleotide probe

SEQ ID NO: 35064 - DNA, 32 bp, Artificial; identical to SEQ ID NO: 5595
  oligonucleotide probe

SEQ ID NO: 35065 - DNA, 32 bp, Artificial; identical to SEQ ID NO: 5547
  oligonucleotide probe

SEQ ID NO: 35066 - DNA, 32 bp, Artificial; identical to SEQ ID NO: 5537
  oligonucleotide probe

SEQ ID NO: 35067 - DNA, 32 bp, Artificial; identical to SEQ ID NO: 5538
  oligonucleotide probe

SEQ ID NO: 35068 - DNA, 32 bp, Artificial; identical to SEQ ID NO: 5539
  oligonucleotide probe

SEQ ID NO: 35069 - DNA, 32 bp, Artificial; identical to SEQ ID NO: 5541
  oligonucleotide probe

SEQ ID NO: 35070 - DNA, 32 bp, Artificial; identical to SEQ ID NO: 5545
  oligonucleotide probe

SEQ ID NO: 35071 - DNA, 32 bp, Artificial; identical to SEQ ID NO: 5610
  oligonucleotide probe

SEQ ID NO: 35072 - DNA, 32 bp, Artificial; identical to SEQ ID NO: 5611
  oligonucleotide probe

SEQ ID NO: 35073 - DNA, 32 bp, Artificial; identical to SEQ ID NO: 5555
  oligonucleotide probe

SEQ ID NO: 35074 - DNA, 32 bp, Artificial; identical to SEQ ID NO: 5159
  oligonucleotide probe

SEQ ID NO: 35075 - DNA, 32 bp, Artificial; identical to SEQ ID NO: 5585
  oligonucleotide probe

SEQ ID NO: 35076 - DNA, 32 bp, Artificial; identical to SEQ ID NO: 5539
  oligonucleotide probe

SEQ ID NO: 35077 - DNA, 32 bp, Artificial; identical to SEQ ID NO: 5550
  oligonucleotide probe

SEQ ID NO: 35078 - DNA, 32 bp, Artificial; identical to SEQ ID NO: 5540
  oligonucleotide probe

SEQ ID NO: 35079 - DNA, 32 bp, Artificial; identical to SEQ ID NO: 5416
  oligonucleotide probe

SEQ ID NO: 35080 - DNA, 32 bp, Artificial; identical to SEQ ID NO: 5239
  oligonucleotide probe

SEQ ID NO: 35081 - DNA, 32 bp, Artificial; identical to SEQ ID NO: 5539
  oligonucleotide probe

SEQ ID NO: 35082 - DNA, 32 bp, Artificial; identical to SEQ ID NO: 5410
  oligonucleotide probe

SEQ ID NO: 35083 - DNA, 32 bp, Artificial; identical to SEQ ID NO: 5584
  oligonucleotide probe

SEQ ID NO: 35084 - DNA, 32 bp, Artificial; identical to SEQ ID NO: 5585
  oligonucleotide probe

SEQ ID NO: 35085 - DNA, 32 bp, Artificial; identical to SEQ ID NO: 5594
  oligonucleotide probe

SEQ ID NO: 35086 - DNA, 32 bp, Artificial; identical to SEQ ID NO: 5595
  oligonucleotide probe

SEQ ID NO: 35087 - DNA, 32 bp, Artificial; identical to SEQ ID NO: 5594
  oligonucleotide probe

SEQ ID NO: 35088 - DNA, 32 bp, Artificial; identical to SEQ ID NO: 5595
  oligonucleotide probe

SEQ ID NO: 35089 - DNA, 32 bp, Artificial; identical to SEQ ID NO: 5594
  oligonucleotide probe

SEQ ID NO: 35090 - DNA, 32 bp, Artificial; identical to SEQ ID NO: 5584
  oligonucleotide probe

SEQ ID NO: 35091 - DNA, 32 bp, Artificial; identical to SEQ ID NO: 5545
  oligonucleotide probe

SEQ ID NO: 35092 - DNA, 32 bp, Artificial; identical to SEQ ID NO: 5536
  oligonucleotide probe

SEQ ID NO: 35093 - DNA, 32 bp, Artificial; identical to SEQ ID NO: 5140
  oligonucleotide probe

SEQ ID NO: 35094 - DNA, 32 bp, Artificial; identical to SEQ ID NO: 5134
  oligonucleotide probe

SEQ ID NO: 35095 - DNA, 32 bp, Artificial; identical to SEQ ID NO: 5564
  oligonucleotide probe

SEQ ID NO: 35096 - DNA, 32 bp, Artificial; identical to SEQ ID NO: 5565
  oligonucleotide probe

SEQ ID NO: 35097 - DNA, 32 bp, Artificial; identical to SEQ ID NO: 5221
  oligonucleotide probe

SEQ ID NO: 35098 - DNA, 32 bp, Artificial; identical to SEQ ID NO: 5222
  oligonucleotide probe

SEQ ID NO: 35099 - DNA, 32 bp, Artificial; identical to SEQ ID NO: 5161
  oligonucleotide probe

SEQ ID NO: 35100 - DNA, 32 bp, Artificial; identical to SEQ ID NO: 5138
  oligonucleotide probe

SEQ ID NO: 35101 - DNA, 32 bp, Artificial; identical to SEQ ID NO: 5160
  oligonucleotide probe

SEQ ID NO: 35102 - DNA, 32 bp, Artificial; identical to SEQ ID NO: 5140
  oligonucleotide probe

SEQ ID NO: 35103 - DNA, 32 bp, Artificial; identical to SEQ ID NO: 6145
  oligonucleotide probe

SEQ ID NO: 35104 - DNA, 32 bp, Artificial; identical to SEQ ID NO: 5610
  oligonucleotide probe

SEQ ID NO: 35105 - DNA, 32 bp, Artificial; identical to SEQ ID NO: 5708
  oligonucleotide probe

SEQ ID NO: 35106 - DNA, 32 bp, Artificial; identical to SEQ ID NO: 5709
  oligonucleotide probe

SEQ ID NO: 35107 - DNA, 32 bp, Artificial; identical to SEQ ID NO: 5555
  oligonucleotide probe

SEQ ID NO: 35108 - DNA, 32 bp, Artificial; identical to SEQ ID NO: 5551
  oligonucleotide probe

SEQ ID NO: 35109 - DNA, 32 bp, Artificial; identical to SEQ ID NO: 5411
  oligonucleotide probe

SEQ ID NO: 35110 - DNA, 32 bp, Artificial; identical to SEQ ID NO: 5242
  oligonucleotide probe

SEQ ID NO: 35111 - DNA, 32 bp, Artificial; identical to SEQ ID NO: 5610
  oligonucleotide probe

SEQ ID NO: 35112 - DNA, 32 bp, Artificial; identical to SEQ ID NO: 5611
  oligonucleotide probe

SEQ ID NO: 35113 - DNA, 32 bp, Artificial; identical to SEQ ID NO: 5554
  oligonucleotide probe

SEQ ID NO: 35114 - DNA, 32 bp, Artificial; identical to SEQ ID NO: 5555
  oligonucleotide probe

SEQ ID NO: 35115 - DNA, 32 bp, Artificial; identical to SEQ ID NO: 5555
  oligonucleotide probe

SEQ ID NO: 35116 - DNA, 32 bp, Artificial; identical to SEQ ID NO: 5551
  oligonucleotide probe

SEQ ID NO: 35117 - DNA, 32 bp, Artificial; identical to SEQ ID NO: 5217
  oligonucleotide probe

SEQ ID NO: 35118 - DNA, 32 bp, Artificial; identical to SEQ ID NO: 5223
  oligonucleotide probe

SEQ ID NO: 35119 - DNA, 32 bp, Artificial; identical to SEQ ID NO: 5540
  oligonucleotide probe

SEQ ID NO: 35120 - DNA, 32 bp, Artificial; identical to SEQ ID NO: 5544
  oligonucleotide probe

SEQ ID NO: 35121 - DNA, 32 bp, Artificial; identical to SEQ ID NO: 5550
  oligonucleotide probe

SEQ ID NO: 35122 - DNA, 32 bp, Artificial; identical to SEQ ID NO: 5551
  oligonucleotide probe

SEQ ID NO: 35123 - DNA, 32 bp, Artificial; identical to SEQ ID NO: 5540
  oligonucleotide probe

SEQ ID NO: 35124 - DNA, 32 bp, Artificial; identical to SEQ ID NO: 5541
  oligonucleotide probe

SEQ ID NO: 35125 - DNA, 32 bp, Artificial; identical to SEQ ID NO: 5550
  oligonucleotide probe

SEQ ID NO: 35126 - DNA, 32 bp, Artificial; identical to SEQ ID NO: 5540
  oligonucleotide probe

SEQ ID NO: 35127 - DNA, 32 bp, Artificial; identical to SEQ ID NO: 5399
  oligonucleotide probe

SEQ ID NO: 35128 - DNA, 32 bp, Artificial; identical to SEQ ID NO: 5240
  oligonucleotide probe

SEQ ID NO: 35129 - DNA, 32 bp, Artificial; identical to SEQ ID NO: 6131
  oligonucleotide probe

SEQ ID NO: 35130 - DNA, 32 bp, Artificial; identical to SEQ ID NO: 6074
  oligonucleotide probe

SEQ ID NO: 35131 - DNA, 32 bp, Artificial; identical to SEQ ID NO: 5610
  oligonucleotide probe

SEQ ID NO: 35132 - DNA, 32 bp, Artificial; identical to SEQ ID NO: 5594
  oligonucleotide probe

SEQ ID NO: 35133 - DNA, 32 bp, Artificial; identical to SEQ ID NO: 5708
  oligonucleotide probe

SEQ ID NO: 35134 - DNA, 32 bp, Artificial; identical to SEQ ID NO: 5709
  oligonucleotide probe

SEQ ID NO: 35135 - DNA, 32 bp, Artificial; identical to SEQ ID NO: 5545
  oligonucleotide probe

SEQ ID NO: 35136 - DNA, 32 bp, Artificial; identical to SEQ ID NO: 5536
  oligonucleotide probe

SEQ ID NO: 35137 - DNA, 32 bp, Artificial; identical to SEQ ID NO: 5709
  oligonucleotide probe

SEQ ID NO: 35138 - DNA, 32 bp, Artificial; identical to SEQ ID NO: 5555
  oligonucleotide probe

SEQ ID NO: 35139 - DNA, 32 bp, Artificial; identical to SEQ ID NO: 5584
  oligonucleotide probe

SEQ ID NO: 35140 - DNA, 32 bp, Artificial; identical to SEQ ID NO: 5585
  oligonucleotide probe

SEQ ID NO: 35141 - DNA, 32 bp, Artificial; identical to SEQ ID NO: 5550
  oligonucleotide probe

SEQ ID NO: 35142 - DNA, 32 bp, Artificial; identical to SEQ ID NO: 5540
  oligonucleotide probe

SEQ ID NO: 35143 - DNA, 32 bp, Artificial; identical to SEQ ID NO: 5242
  oligonucleotide probe

SEQ ID NO: 35144 - DNA, 32 bp, Artificial; identical to SEQ ID NO: 5221
  oligonucleotide probe

SEQ ID NO: 35145 - DNA, 32 bp, Artificial; identical to SEQ ID NO: 5232
  oligonucleotide probe

SEQ ID NO: 35146 - DNA, 32 bp, Artificial; identical to SEQ ID NO: 5218
  oligonucleotide probe

SEQ ID NO: 35147 - DNA, 32 bp, Artificial; identical to SEQ ID NO: 6131
  oligonucleotide probe

SEQ ID NO: 35148 - DNA, 32 bp, Artificial; identical to SEQ ID NO: 6074
  oligonucleotide probe

SEQ ID NO: 35149 - DNA, 32 bp, Artificial; identical to SEQ ID NO: 6145
  oligonucleotide probe

SEQ ID NO: 35150 - DNA, 32 bp, Artificial; identical to SEQ ID NO: 6070
  oligonucleotide probe

SEQ ID NO: 35151 - DNA, 32 bp, Artificial; identical to SEQ ID NO: 6145
  oligonucleotide probe

SEQ ID NO: 35152 - DNA, 32 bp, Artificial; identical to SEQ ID NO: 6070
  oligonucleotide probe

SEQ ID NO: 35153 - DNA, 32 bp, Artificial; identical to SEQ ID NO: 5610
  oligonucleotide probe

SEQ ID NO: 35154 - DNA, 32 bp, Artificial; identical to SEQ ID NO: 5611
  oligonucleotide probe

SEQ ID NO: 35155 - DNA, 32 bp, Artificial; identical to SEQ ID NO: 5594
  oligonucleotide probe

SEQ ID NO: 35156 - DNA, 32 bp, Artificial; identical to SEQ ID NO: 5584
  oligonucleotide probe

SEQ ID NO: 35157 - DNA, 32 bp, Artificial; identical to SEQ ID NO: 5551
  oligonucleotide probe

SEQ ID NO: 35158 - DNA, 32 bp, Artificial; identical to SEQ ID NO: 5541
  oligonucleotide probe

SEQ ID NO: 35159 - DNA, 32 bp, Artificial; identical to SEQ ID NO: 5241
  oligonucleotide probe

SEQ ID NO: 35160 - DNA, 32 bp, Artificial; identical to SEQ ID NO: 5229
  oligonucleotide probe

SEQ ID NO: 35161 - DNA, 32 bp, Artificial; identical to SEQ ID NO: 5539
  oligonucleotide probe

SEQ ID NO: 35162 - DNA, 32 bp, Artificial; identical to SEQ ID NO: 5565
  oligonucleotide probe

SEQ ID NO: 35163 - DNA, 32 bp, Artificial; identical to SEQ ID NO: 5554
  oligonucleotide probe

SEQ ID NO: 35164 - DNA, 32 bp, Artificial; identical to SEQ ID NO: 5550
  oligonucleotide probe

SEQ ID NO: 35165 - DNA, 32 bp, Artificial; identical to SEQ ID NO: 5610
  oligonucleotide probe

SEQ ID NO: 35166 - DNA, 32 bp, Artificial; identical to SEQ ID NO: 5584
  oligonucleotide probe

SEQ ID NO: 35167 - DNA, 32 bp, Artificial; identical to SEQ ID NO: 6131
  oligonucleotide probe

SEQ ID NO: 35168 - DNA, 32 bp, Artificial; identical to SEQ ID NO: 5554
  oligonucleotide probe

SEQ ID NO: 35169 - DNA, 32 bp, Artificial; identical to SEQ ID NO: 5540
  oligonucleotide probe

SEQ ID NO: 35170 - DNA, 32 bp, Artificial; identical to SEQ ID NO: 5546
  oligonucleotide probe

SEQ ID NO: 35171 - DNA, 32 bp, Artificial; identical to SEQ ID NO: 5564
  oligonucleotide probe

SEQ ID NO: 35172 - DNA, 32 bp, Artificial; identical to SEQ ID NO: 5536
  oligonucleotide probe

SEQ ID NO: 35173 - DNA, 32 bp, Artificial; identical to SEQ ID NO: 5545
  oligonucleotide probe

SEQ ID NO: 35174 - DNA, 32 bp, Artificial; identical to SEQ ID NO: 5537
  oligonucleotide probe

SEQ ID NO: 35175 - DNA, 32 bp, Artificial; identical to SEQ ID NO: 5539
  oligonucleotide probe

SEQ ID NO: 35176 - DNA, 32 bp, Artificial; identical to SEQ ID NO: 5547
  oligonucleotide probe

SEQ ID NO: 35177 - DNA, 32 bp, Artificial; identical to SEQ ID NO: 6070
  oligonucleotide probe

SEQ ID NO: 35178 - DNA, 32 bp, Artificial; identical to SEQ ID NO: 5595
  oligonucleotide probe

SEQ ID NO: 35179 - DNA, 32 bp, Artificial; identical to SEQ ID NO: 5709
  oligonucleotide probe

SEQ ID NO: 35180 - DNA, 32 bp, Artificial; identical to SEQ ID NO: 5551
  oligonucleotide probe

SEQ ID NO: 35181 - DNA, 32 bp, Artificial; identical to SEQ ID NO: 5135
  oligonucleotide probe

SEQ ID NO: 35182 - DNA, 32 bp, Artificial; identical to SEQ ID NO: 5136
  oligonucleotide probe

SEQ ID NO: 35183 - DNA, 32 bp, Artificial; identical to SEQ ID NO: 5195
  oligonucleotide probe

SEQ ID NO: 35184 - DNA, 32 bp, Artificial; identical to SEQ ID NO: 5133
  oligonucleotide probe

SEQ ID NO: 35185 - DNA, 32 bp, Artificial; identical to SEQ ID NO: 5171
  oligonucleotide probe

SEQ ID NO: 35186 - DNA, 32 bp, Artificial; identical to SEQ ID NO: 5163
  oligonucleotide probe

SEQ ID NO: 35187 - DNA, 32 bp, Artificial; identical to SEQ ID NO: 5223
  oligonucleotide probe

SEQ ID NO: 35188 - DNA, 32 bp, Artificial; identical to SEQ ID NO: 6070
  oligonucleotide probe

SEQ ID NO: 35189 - DNA, 32 bp, Artificial; identical to SEQ ID NO: 5220
  oligonucleotide probe

SEQ ID NO: 35190 - DNA, 32 bp, Artificial; identical to SEQ ID NO: 5219
  oligonucleotide probe

SEQ ID NO: 35191 - DNA, 32 bp, Artificial; identical to SEQ ID NO: 5253
  oligonucleotide probe

SEQ ID NO: 35192 - DNA, 32 bp, Artificial; identical to SEQ ID NO: 5137
  oligonucleotide probe

SEQ ID NO: 35193 - DNA, 16 bp, Artificial
  oligonucleotide probe
caccgacgggaaacgc

SEQ ID NO: 35194 - DNA, 16 bp, Artificial
  oligonucleotide probe
gtccacgctggcgacg

SEQ ID NO: 35195 - DNA, 16 bp, Artificial
  oligonucleotide probe
gagcgcgacacccagg

SEQ ID NO: 35196 - DNA, 16 bp, Artificial
  oligonucleotide probe
gcaggcagccaatggc

SEQ ID NO: 35197 - DNA, 16 bp, Artificial
  oligonucleotide probe
accatggcacgcgacg

SEQ ID NO: 35198 - DNA, 16 bp, Artificial
  oligonucleotide probe
caggggaagggtcgga

SEQ ID NO: 35199 - DNA, 16 bp, Artificial
  oligonucleotide probe
accatggcacgcgacg

SEQ ID NO: 35200 - DNA, 16 bp, Artificial
  oligonucleotide probe
caccgcgaggtcacgc

SEQ ID NO: 35201 - DNA, 16 bp, Artificial
  oligonucleotide probe
acgcaccagtcccgga

SEQ ID NO: 35202 - DNA, 16 bp, Artificial
  oligonucleotide probe
caccgacgggaaacgc

SEQ ID NO: 35203 - DNA, 16 bp, Artificial
  oligonucleotide probe
gagcgcgacacccagg

SEQ ID NO: 35204 - DNA, 16 bp, Artificial
  oligonucleotide probe
gcaggcagccaatggc

SEQ ID NO: 35205 - DNA, 16 bp, Artificial
  oligonucleotide probe
caccgacgggaaacgc

SEQ ID NO: 35206 - DNA, 16 bp, Artificial
  oligonucleotide probe
gtccacgctggcgacg

SEQ ID NO: 35207 - DNA, 16 bp, Artificial
  oligonucleotide probe
gagcgcgacacccagg

SEQ ID NO: 35208 - DNA, 16 bp, Artificial
  oligonucleotide probe
gtccacgctggcgacg

SEQ ID NO: 35209 - DNA, 16 bp, Artificial
  oligonucleotide probe
gagcgcgacacccagg

SEQ ID NO: 35210 - DNA, 16 bp, Artificial
  oligonucleotide probe
gcaggcagccaatggc

SEQ ID NO: 35211 - DNA, 16 bp, Artificial
  oligonucleotide probe
acgcaccagtcccgga

SEQ ID NO: 35212 - DNA, 16 bp, Artificial
  oligonucleotide probe
caccgacgggaaacgc

SEQ ID NO: 35213 - DNA, 16 bp, Artificial
  oligonucleotide probe
caggggaagggtcgga

SEQ ID NO: 35214 - DNA, 16 bp, Artificial
  oligonucleotide probe
caccgacgggaaacgc

SEQ ID NO: 35215 - DNA, 16 bp, Artificial
  oligonucleotide probe
caccgacgggaaacgc

SEQ ID NO: 35216 - DNA, 16 bp, Artificial
  oligonucleotide probe
gtccacgctggcgacg

SEQ ID NO: 35217 - DNA, 16 bp, Artificial
  oligonucleotide probe
gagcgcgacacccagg

SEQ ID NO: 35218 - DNA, 16 bp, Artificial
  oligonucleotide probe
gcaggcagccaatggc

SEQ ID NO: 35219 - DNA, 16 bp, Artificial
  oligonucleotide probe
caccgggtggtcagcg

SEQ ID NO: 35220 - DNA, 16 bp, Artificial
  oligonucleotide probe
gtggcggaggtcggaa

SEQ ID NO: 35221 - DNA, 16 bp, Artificial
  oligonucleotide probe
agcggtccgcgagagc

SEQ ID NO: 35222 - DNA, 16 bp, Artificial
  oligonucleotide probe
gagcgcgacacccagg

SEQ ID NO: 35223 - DNA, 16 bp, Artificial
  oligonucleotide probe
gcctcggagacggcag

SEQ ID NO: 35224 - DNA, 16 bp, Artificial
  oligonucleotide probe
acgcaccagtcccgga

SEQ ID NO: 35225 - DNA, 16 bp, Artificial
  oligonucleotide probe
gagcgcgacacccagg

SEQ ID NO: 35226 - DNA, 16 bp, Artificial
  oligonucleotide probe
gcaggcagccaatggc

SEQ ID NO: 35227 - DNA, 16 bp, Artificial
  oligonucleotide probe
gtccacgctggcgacg

SEQ ID NO: 35228 - DNA, 16 bp, Artificial
  oligonucleotide probe
caggggaagggtcgga

SEQ ID NO: 35229 - DNA, 16 bp, Artificial
  oligonucleotide probe
caggggaagggtcgga

SEQ ID NO: 35230 - DNA, 16 bp, Artificial
  oligonucleotide probe
gcaggcagccaatggc

SEQ ID NO: 35231 - DNA, 16 bp, Artificial
  oligonucleotide probe
gacggcgagtgggcag

SEQ ID NO: 35232 - DNA, 16 bp, Artificial
  oligonucleotide probe
agcggtccgcgagagc

SEQ ID NO: 35233 - DNA, 16 bp, Artificial
  oligonucleotide probe
gcctcggagacggcag

SEQ ID NO: 35234 - DNA, 16 bp, Artificial
  oligonucleotide probe
caggggaagggtcgga

SEQ ID NO: 35235 - DNA, 16 bp, Artificial
  oligonucleotide probe
caccgcgaggtcacgc

SEQ ID NO: 35236 - DNA, 16 bp, Artificial
  oligonucleotide probe
gtccacgctggcgacg

SEQ ID NO: 35237 - DNA, 16 bp, Artificial
  oligonucleotide probe
tggcgtgggggtccaa

SEQ ID NO: 35238 - DNA, 16 bp, Artificial
  oligonucleotide probe
accatggcacgcgacg

SEQ ID NO: 35239 - DNA, 16 bp, Artificial
  oligonucleotide probe
gacggcgagtgggcag

SEQ ID NO: 35240 - DNA, 16 bp, Artificial
  oligonucleotide probe
caccgggtggtcagcg

SEQ ID NO: 35241 - DNA, 16 bp, Artificial
  oligonucleotide probe
acgcaccagtcccgga

SEQ ID NO: 35242 - DNA, 16 bp, Artificial
  oligonucleotide probe
gagcgcgacacccagg

SEQ ID NO: 35243 - DNA, 16 bp, Artificial
  oligonucleotide probe
caggggaagggtcgga

SEQ ID NO: 35244 - DNA, 16 bp, Artificial
  oligonucleotide probe
gagcgcgacacccagg

SEQ ID NO: 35245 - DNA, 16 bp, Artificial
  oligonucleotide probe
gcctagcgcctcgacg

SEQ ID NO: 35246 - DNA, 16 bp, Artificial
  oligonucleotide probe
caccgggtggtcagcg

SEQ ID NO: 35247 - DNA, 16 bp, Artificial
  oligonucleotide probe
accatggcacgcgacg

SEQ ID NO: 35248 - DNA, 16 bp, Artificial
  oligonucleotide probe
gtccacgctggcgacg

SEQ ID NO: 35249 - DNA, 16 bp, Artificial
  oligonucleotide probe
gcctagcgcctcgacg

SEQ ID NO: 35250 - DNA, 16 bp, Artificial
  oligonucleotide probe
gcctcggagacggcag

SEQ ID NO: 35251 - DNA, 16 bp, Artificial
  oligonucleotide probe
gacggcgagtgggcag

SEQ ID NO: 35252 - DNA, 16 bp, Artificial
  oligonucleotide probe
tggcgtgggggtccaa

SEQ ID NO: 35253 - DNA, 16 bp, Artificial
  oligonucleotide probe
gtccacgctggcgacg

SEQ ID NO: 35254 - DNA, 16 bp, Artificial
  oligonucleotide probe
gcaggcagccaatggc

SEQ ID NO: 35255 - DNA, 16 bp, Artificial
  oligonucleotide probe
gacgcaggcggagggt

SEQ ID NO: 35256 - DNA, 16 bp, Artificial
  oligonucleotide probe
gacggcgagtgggcag

SEQ ID NO: 35257 - DNA, 16 bp, Artificial
  oligonucleotide probe
caccgggtggtcagcg

SEQ ID NO: 35258 - DNA, 16 bp, Artificial
  oligonucleotide probe
gtggcggaggtcggaa

SEQ ID NO: 35259 - DNA, 16 bp, Artificial
  oligonucleotide probe
gcctcggagacggcag

SEQ ID NO: 35260 - DNA, 16 bp, Artificial
  oligonucleotide probe
gacgcaggcggagggt

SEQ ID NO: 35261 - DNA, 16 bp, Artificial
  oligonucleotide probe
gcctcggagacggcag

SEQ ID NO: 35262 - DNA, 16 bp, Artificial
  oligonucleotide probe
accatggcacgcgacg

SEQ ID NO: 35263 - DNA, 16 bp, Artificial
  oligonucleotide probe
gacgcaggcggagggt

SEQ ID NO: 35264 - DNA, 16 bp, Artificial
  oligonucleotide probe
acgcaccagtcccgga

SEQ ID NO: 35265 - DNA, 16 bp, Artificial
  oligonucleotide probe
acgcaccagtcccgga

SEQ ID NO: 35266 - DNA, 16 bp, Artificial
  oligonucleotide probe
caccgacgggaaacgc

SEQ ID NO: 35267 - DNA, 16 bp, Artificial
  oligonucleotide probe
agcggtccgcgagagc

SEQ ID NO: 35268 - DNA, 16 bp, Artificial
  oligonucleotide probe
caggggaagggtcgga

SEQ ID NO: 35269 - DNA, 16 bp, Artificial
  oligonucleotide probe
gacgcaggcggagggt

SEQ ID NO: 35270 - DNA, 16 bp, Artificial
  oligonucleotide probe
caccgcgaggtcacgc

SEQ ID NO: 35271 - DNA, 16 bp, Artificial
  oligonucleotide probe
caccgggtggtcagcg

SEQ ID NO: 35272 - DNA, 16 bp, Artificial
  oligonucleotide probe
acgcaccagtcccgga

SEQ ID NO: 35273 - DNA, 16 bp, Artificial
  oligonucleotide probe
accatggcacgcgacg

SEQ ID NO: 35274 - DNA, 16 bp, Artificial
  oligonucleotide probe
caccgacgggaaacgc

SEQ ID NO: 35275 - DNA, 16 bp, Artificial
  oligonucleotide probe
gtggcggaggtcggaa

SEQ ID NO: 35276 - DNA, 16 bp, Artificial
  oligonucleotide probe
gtccacgctggcgacg

SEQ ID NO: 35277 - DNA, 16 bp, Artificial
  oligonucleotide probe
gcctgggtcaccacgc

SEQ ID NO: 35278 - DNA, 16 bp, Artificial
  oligonucleotide probe
cctccgaggacgcgga

SEQ ID NO: 35279 - DNA, 16 bp, Artificial
  oligonucleotide probe
gcgagtggcagggcct

SEQ ID NO: 35280 - DNA, 16 bp, Artificial
  oligonucleotide probe
tggcacgcgagccagg

SEQ ID NO: 35281 - DNA, 16 bp, Artificial
  oligonucleotide probe
accacggaagcgcgga

SEQ ID NO: 35282 - DNA, 16 bp, Artificial
  oligonucleotide probe
ggtccggagcagacgc

SEQ ID NO: 35283 - DNA, 16 bp, Artificial
  oligonucleotide probe
ggaaagcggcctggaa

SEQ ID NO: 35284 - DNA, 16 bp, Artificial
  oligonucleotide probe
gagcgcctcctcgagc

SEQ ID NO: 35285 - DNA, 16 bp, Artificial
  oligonucleotide probe
gcgagtggcagggcct

SEQ ID NO: 35286 - DNA, 16 bp, Artificial
  oligonucleotide probe
tggcacgcgagccagg

SEQ ID NO: 35287 - DNA, 16 bp, Artificial
  oligonucleotide probe
gcgagtggcagggcct

SEQ ID NO: 35288 - DNA, 16 bp, Artificial
  oligonucleotide probe
tggcacgcgagccagg

SEQ ID NO: 35289 - DNA, 16 bp, Artificial
  oligonucleotide probe
acgcgagcgggtgcag

SEQ ID NO: 35290 - DNA, 16 bp, Artificial
  oligonucleotide probe
accacggaagcgcgga

SEQ ID NO: 35291 - DNA, 16 bp, Artificial
  oligonucleotide probe
gacggacgacgcgtgg

SEQ ID NO: 35292 - DNA, 16 bp, Artificial
  oligonucleotide probe
gtggcaggagcgacgc

SEQ ID NO: 35293 - DNA, 16 bp, Artificial
  oligonucleotide probe
acgcgagcgggtgcag

SEQ ID NO: 35294 - DNA, 16 bp, Artificial
  oligonucleotide probe
accacggaagcgcgga

SEQ ID NO: 35295 - DNA, 16 bp, Artificial
  oligonucleotide probe
gcgagtggcagggcct

SEQ ID NO: 35296 - DNA, 16 bp, Artificial
  oligonucleotide probe
tggcacgcgagccagg

SEQ ID NO: 35297 - DNA, 16 bp, Artificial
  oligonucleotide probe
gcctgggtcaccacgc

SEQ ID NO: 35298 - DNA, 16 bp, Artificial
  oligonucleotide probe
cctccgaggacgcgga

SEQ ID NO: 35299 - DNA, 16 bp, Artificial
  oligonucleotide probe
gcaggtggtggcgagc

SEQ ID NO: 35300 - DNA, 16 bp, Artificial
  oligonucleotide probe
tggcgggtgacggtgg

SEQ ID NO: 35301 - DNA, 16 bp, Artificial
  oligonucleotide probe
caggagcgggaagcga

SEQ ID NO: 35302 - DNA, 16 bp, Artificial
  oligonucleotide probe
gcctgtgggtccgcga

SEQ ID NO: 35303 - DNA, 16 bp, Artificial
  oligonucleotide probe
ggaaagcggcctggaa

SEQ ID NO: 35304 - DNA, 16 bp, Artificial
  oligonucleotide probe
gagcgcctcctcgagc

SEQ ID NO: 35305 - DNA, 16 bp, Artificial
  oligonucleotide probe
gcctgggtcaccacgc

SEQ ID NO: 35306 - DNA, 16 bp, Artificial
  oligonucleotide probe
cctccgaggacgcgga

SEQ ID NO: 35307 - DNA, 16 bp, Artificial
  oligonucleotide probe
gcgagtggcagggcct

SEQ ID NO: 35308 - DNA, 16 bp, Artificial
  oligonucleotide probe
tggcacgcgagccagg

SEQ ID NO: 35309 - DNA, 16 bp, Artificial
  oligonucleotide probe
gcctgggtcaccacgc

SEQ ID NO: 35310 - DNA, 16 bp, Artificial
  oligonucleotide probe
cctccgaggacgcgga

SEQ ID NO: 35311 - DNA, 16 bp, Artificial
  oligonucleotide probe
gcaggtggtggcgagc

SEQ ID NO: 35312 - DNA, 16 bp, Artificial
  oligonucleotide probe
tggcgggtgacggtgg

SEQ ID NO: 35313 - DNA, 16 bp, Artificial
  oligonucleotide probe
gcagcctctggccgag

SEQ ID NO: 35314 - DNA, 16 bp, Artificial
  oligonucleotide probe
ggtccggagcagacgc

SEQ ID NO: 35315 - DNA, 16 bp, Artificial
  oligonucleotide probe
ggaaagcggcctggaa

SEQ ID NO: 35316 - DNA, 16 bp, Artificial
  oligonucleotide probe
gagcgcctcctcgagc

SEQ ID NO: 35317 - DNA, 16 bp, Artificial
  oligonucleotide probe
gcgagtggcagggcct

SEQ ID NO: 35318 - DNA, 16 bp, Artificial
  oligonucleotide probe
tggcacgcgagccagg

SEQ ID NO: 35319 - DNA, 16 bp, Artificial
  oligonucleotide probe
ggaaagcggcctggaa

SEQ ID NO: 35320 - DNA, 16 bp, Artificial
  oligonucleotide probe
gagcgcctcctcgagc

SEQ ID NO: 35321 - DNA, 16 bp, Artificial
  oligonucleotide probe
ggaaagcggcctggaa

SEQ ID NO: 35322 - DNA, 16 bp, Artificial
  oligonucleotide probe
gagcgcctcctcgagc

SEQ ID NO: 35323 - DNA, 16 bp, Artificial
  oligonucleotide probe
gcgagtggcagggcct

SEQ ID NO: 35324 - DNA, 16 bp, Artificial
  oligonucleotide probe
tggcacgcgagccagg

SEQ ID NO: 35325 - DNA, 16 bp, Artificial
  oligonucleotide probe
cctccgaggacgcgga

SEQ ID NO: 35326 - DNA, 16 bp, Artificial
  oligonucleotide probe
gagcgcctcctcgagc

SEQ ID NO: 35327 - DNA, 16 bp, Artificial
  oligonucleotide probe
ggaaagcggcctggaa

SEQ ID NO: 35328 - DNA, 16 bp, Artificial
  oligonucleotide probe
gagcgcctcctcgagc

SEQ ID NO: 35329 - DNA, 16 bp, Artificial
  oligonucleotide probe
gcgagtggcagggcct

SEQ ID NO: 35330 - DNA, 16 bp, Artificial
  oligonucleotide probe
tggcacgcgagccagg

SEQ ID NO: 35331 - DNA, 16 bp, Artificial
  oligonucleotide probe
gacggacgacgcgtgg

SEQ ID NO: 35332 - DNA, 16 bp, Artificial
  oligonucleotide probe
gtggcaggagcgacgc

SEQ ID NO: 35333 - DNA, 16 bp, Artificial
  oligonucleotide probe
gcagcctctggccgag

SEQ ID NO: 35334 - DNA, 16 bp, Artificial
  oligonucleotide probe
ggtccggagcagacgc

SEQ ID NO: 35335 - DNA, 16 bp, Artificial
  oligonucleotide probe
cctccgaggacgcgga

SEQ ID NO: 35336 - DNA, 16 bp, Artificial
  oligonucleotide probe
gagcgcctcctcgagc

SEQ ID NO: 35337 - DNA, 16 bp, Artificial
  oligonucleotide probe
ggaaagcggcctggaa

SEQ ID NO: 35338 - DNA, 16 bp, Artificial
  oligonucleotide probe
gagcgcctcctcgagc

SEQ ID NO: 35339 - DNA, 16 bp, Artificial
  oligonucleotide probe
gcgagtggcagggcct

SEQ ID NO: 35340 - DNA, 16 bp, Artificial
  oligonucleotide probe
tggcacgcgagccagg

SEQ ID NO: 35341 - DNA, 16 bp, Artificial
  oligonucleotide probe
gcagcctctggccgag

SEQ ID NO: 35342 - DNA, 16 bp, Artificial
  oligonucleotide probe
ggtccggagcagacgc

SEQ ID NO: 35343 - DNA, 16 bp, Artificial
  oligonucleotide probe
gcagcctctggccgag

SEQ ID NO: 35344 - DNA, 16 bp, Artificial
  oligonucleotide probe
ggtccggagcagacgc

SEQ ID NO: 35345 - DNA, 16 bp, Artificial
  oligonucleotide probe
gcagcctctggccgag

SEQ ID NO: 35346 - DNA, 16 bp, Artificial
  oligonucleotide probe
ggtccggagcagacgc

SEQ ID NO: 35347 - DNA, 16 bp, Artificial
  oligonucleotide probe
gcgagtggcagggcct

SEQ ID NO: 35348 - DNA, 16 bp, Artificial
  oligonucleotide probe
tggcacgcgagccagg

SEQ ID NO: 35349 - DNA, 16 bp, Artificial
  oligonucleotide probe
gcagcctctggccgag

SEQ ID NO: 35350 - DNA, 16 bp, Artificial
  oligonucleotide probe
ggtccggagcagacgc

SEQ ID NO: 35351 - DNA, 16 bp, Artificial
  oligonucleotide probe
acgcgagcgggtgcag

SEQ ID NO: 35352 - DNA, 16 bp, Artificial
  oligonucleotide probe
accacggaagcgcgga

SEQ ID NO: 35353 - DNA, 16 bp, Artificial
  oligonucleotide probe
acgcgagcgggtgcag

SEQ ID NO: 35354 - DNA, 16 bp, Artificial
  oligonucleotide probe
accacggaagcgcgga

SEQ ID NO: 35355 - DNA, 16 bp, Artificial
  oligonucleotide probe
gcgagtggcagggcct

SEQ ID NO: 35356 - DNA, 16 bp, Artificial
  oligonucleotide probe
tggcacgcgagccagg

SEQ ID NO: 35357 - DNA, 16 bp, Artificial
  oligonucleotide probe
acgcgagcgggtgcag

SEQ ID NO: 35358 - DNA, 16 bp, Artificial
  oligonucleotide probe
accacggaagcgcgga

SEQ ID NO: 35359 - DNA, 16 bp, Artificial
  oligonucleotide probe
gcctgggtcaccacgc

SEQ ID NO: 35360 - DNA, 16 bp, Artificial
  oligonucleotide probe
cctccgaggacgcgga

SEQ ID NO: 35361 - DNA, 16 bp, Artificial
  oligonucleotide probe
acgcgagcgggtgcag

SEQ ID NO: 35362 - DNA, 16 bp, Artificial
  oligonucleotide probe
accacggaagcgcgga

SEQ ID NO: 35363 - DNA, 16 bp, Artificial
  oligonucleotide probe
gcgagtggcagggcct

SEQ ID NO: 35364 - DNA, 16 bp, Artificial
  oligonucleotide probe
tggcacgcgagccagg

SEQ ID NO: 35365 - DNA, 16 bp, Artificial
  oligonucleotide probe
gcgagtggcagggcct

SEQ ID NO: 35366 - DNA, 16 bp, Artificial
  oligonucleotide probe
tggcacgcgagccagg

SEQ ID NO: 35367 - DNA, 16 bp, Artificial
  oligonucleotide probe
gcgagtggcagggcct

SEQ ID NO: 35368 - DNA, 16 bp, Artificial
  oligonucleotide probe
tggcacgcgagccagg

SEQ ID NO: 35369 - DNA, 16 bp, Artificial
  oligonucleotide probe
ggaaagcggcctggaa

SEQ ID NO: 35370 - DNA, 16 bp, Artificial
  oligonucleotide probe
gagcgcctcctcgagc

SEQ ID NO: 35371 - DNA, 16 bp, Artificial
  oligonucleotide probe
gcctgggtcaccacgc

SEQ ID NO: 35372 - DNA, 16 bp, Artificial
  oligonucleotide probe
cctccgaggacgcgga

SEQ ID NO: 35373 - DNA, 16 bp, Artificial
  oligonucleotide probe
gcaggtggtggcgagc

SEQ ID NO: 35374 - DNA, 16 bp, Artificial
  oligonucleotide probe
tggcgggtgacggtgg

SEQ ID NO: 35375 - DNA, 16 bp, Artificial
  oligonucleotide probe
gcgagtggcagggcct

SEQ ID NO: 35376 - DNA, 16 bp, Artificial
  oligonucleotide probe
tggcacgcgagccagg

SEQ ID NO: 35377 - DNA, 16 bp, Artificial
  oligonucleotide probe
accacggaagcgcgga

SEQ ID NO: 35378 - DNA, 16 bp, Artificial
  oligonucleotide probe
ggtccggagcagacgc

SEQ ID NO: 35379 - DNA, 16 bp, Artificial
  oligonucleotide probe
gacggacgacgcgtgg

SEQ ID NO: 35380 - DNA, 16 bp, Artificial
  oligonucleotide probe
gtggcaggagcgacgc

SEQ ID NO: 35381 - DNA, 16 bp, Artificial
  oligonucleotide probe
cctccgaggacgcgga

SEQ ID NO: 35382 - DNA, 16 bp, Artificial
  oligonucleotide probe
gagcgcctcctcgagc

SEQ ID NO: 35383 - DNA, 16 bp, Artificial
  oligonucleotide probe
gcgagtggcagggcct

SEQ ID NO: 35384 - DNA, 16 bp, Artificial
  oligonucleotide probe
tggcacgcgagccagg

SEQ ID NO: 35385 - DNA, 16 bp, Artificial
  oligonucleotide probe
gcagcctctggccgag

SEQ ID NO: 35386 - DNA, 16 bp, Artificial
  oligonucleotide probe
ggtccggagcagacgc

SEQ ID NO: 35387 - DNA, 16 bp, Artificial
  oligonucleotide probe
ggaaagcggcctggaa

SEQ ID NO: 35388 - DNA, 16 bp, Artificial
  oligonucleotide probe
gagcgcctcctcgagc

SEQ ID NO: 35389 - DNA, 16 bp, Artificial
  oligonucleotide probe
gcctgggtcaccacgc

SEQ ID NO: 35390 - DNA, 16 bp, Artificial
  oligonucleotide probe
cctccgaggacgcgga

SEQ ID NO: 35391 - DNA, 16 bp, Artificial
  oligonucleotide probe
caggagcgggaagcga

SEQ ID NO: 35392 - DNA, 16 bp, Artificial
  oligonucleotide probe
gcctgtgggtccgcga

SEQ ID NO: 35393 - DNA, 16 bp, Artificial
  oligonucleotide probe
gcagcctctggccgag

SEQ ID NO: 35394 - DNA, 16 bp, Artificial
  oligonucleotide probe
ggtccggagcagacgc

SEQ ID NO: 35395 - DNA, 16 bp, Artificial
  oligonucleotide probe
gcctgggtcaccacgc

SEQ ID NO: 35396 - DNA, 16 bp, Artificial
  oligonucleotide probe
cctccgaggacgcgga

SEQ ID NO: 35397 - DNA, 16 bp, Artificial
  oligonucleotide probe
gcagcctctggccgag

SEQ ID NO: 35398 - DNA, 16 bp, Artificial
  oligonucleotide probe
ggtccggagcagacgc

SEQ ID NO: 35399 - DNA, 16 bp, Artificial
  oligonucleotide probe
gcctgggtcaccacgc

SEQ ID NO: 35400 - DNA, 16 bp, Artificial
  oligonucleotide probe
cctccgaggacgcgga

SEQ ID NO: 35401 - DNA, 16 bp, Artificial
  oligonucleotide probe
gcctgggtcaccacgc

SEQ ID NO: 35402 - DNA, 16 bp, Artificial
  oligonucleotide probe
cctccgaggacgcgga

SEQ ID NO: 35403 - DNA, 16 bp, Artificial
  oligonucleotide probe
gacggacgacgcgtgg

SEQ ID NO: 35404 - DNA, 16 bp, Artificial
  oligonucleotide probe
gtggcaggagcgacgc

SEQ ID NO: 35405 - DNA, 16 bp, Artificial
  oligonucleotide probe
gacggacgacgcgtgg

SEQ ID NO: 35406 - DNA, 16 bp, Artificial
  oligonucleotide probe
gtggcaggagcgacgc

SEQ ID NO: 35407 - DNA, 16 bp, Artificial
  oligonucleotide probe
gacggacgacgcgtgg

SEQ ID NO: 35408 - DNA, 16 bp, Artificial
  oligonucleotide probe
gtggcaggagcgacgc

SEQ ID NO: 35409 - DNA, 16 bp, Artificial
  oligonucleotide probe
ggaaagcggcctggaa

SEQ ID NO: 35410 - DNA, 16 bp, Artificial
  oligonucleotide probe
gagcgcctcctcgagc

SEQ ID NO: 35411 - DNA, 16 bp, Artificial
  oligonucleotide probe
gcgagtggcagggcct

SEQ ID NO: 35412 - DNA, 16 bp, Artificial
  oligonucleotide probe
tggcacgcgagccagg

SEQ ID NO: 35413 - DNA, 16 bp, Artificial
  oligonucleotide probe
acgcgagcgggtgcag

SEQ ID NO: 35414 - DNA, 16 bp, Artificial
  oligonucleotide probe
accacggaagcgcgga

SEQ ID NO: 35415 - DNA, 16 bp, Artificial
  oligonucleotide probe
ggaaagcggcctggaa

SEQ ID NO: 35416 - DNA, 16 bp, Artificial
  oligonucleotide probe
gagcgcctcctcgagc

SEQ ID NO: 35417 - DNA, 16 bp, Artificial
  oligonucleotide probe
ggaaagcggcctggaa

SEQ ID NO: 35418 - DNA, 16 bp, Artificial
  oligonucleotide probe
gagcgcctcctcgagc

SEQ ID NO: 35419 - DNA, 16 bp, Artificial
  oligonucleotide probe
ggaaagcggcctggaa

SEQ ID NO: 35420 - DNA, 16 bp, Artificial
  oligonucleotide probe
gagcgcctcctcgagc

SEQ ID NO: 35421 - DNA, 16 bp, Artificial
  oligonucleotide probe
gacggacgacgcgtgg

SEQ ID NO: 35422 - DNA, 16 bp, Artificial
  oligonucleotide probe
gtggcaggagcgacgc

SEQ ID NO: 35423 - DNA, 16 bp, Artificial
  oligonucleotide probe
ggaaagcggcctggaa

SEQ ID NO: 35424 - DNA, 16 bp, Artificial
  oligonucleotide probe
gagcgcctcctcgagc

SEQ ID NO: 35425 - DNA, 16 bp, Artificial
  oligonucleotide probe
gcaggtggtggcgagc

SEQ ID NO: 35426 - DNA, 16 bp, Artificial
  oligonucleotide probe
tggcgggtgacggtgg

SEQ ID NO: 35427 - DNA, 16 bp, Artificial
  oligonucleotide probe
gcgagtggcagggcct

SEQ ID NO: 35428 - DNA, 16 bp, Artificial
  oligonucleotide probe
tggcacgcgagccagg

SEQ ID NO: 35429 - DNA, 16 bp, Artificial
  oligonucleotide probe
ggaaagcggcctggaa

SEQ ID NO: 35430 - DNA, 16 bp, Artificial
  oligonucleotide probe
gagcgcctcctcgagc

SEQ ID NO: 35431 - DNA, 16 bp, Artificial
  oligonucleotide probe
ggaaagcggcctggaa

SEQ ID NO: 35432 - DNA, 16 bp, Artificial
  oligonucleotide probe
gagcgcctcctcgagc

SEQ ID NO: 35433 - DNA, 16 bp, Artificial
  oligonucleotide probe
gcgagtggcagggcct

SEQ ID NO: 35434 - DNA, 16 bp, Artificial
  oligonucleotide probe
tggcacgcgagccagg

SEQ ID NO: 35435 - DNA, 16 bp, Artificial
  oligonucleotide probe
caggagcgggaagcga

SEQ ID NO: 35436 - DNA, 16 bp, Artificial
  oligonucleotide probe
gcctgtgggtccgcga

SEQ ID NO: 35437 - DNA, 16 bp, Artificial
  oligonucleotide probe
gacggacgacgcgtgg

SEQ ID NO: 35438 - DNA, 16 bp, Artificial
  oligonucleotide probe
gtggcaggagcgacgc

SEQ ID NO: 35439 - DNA, 16 bp, Artificial
  oligonucleotide probe
gcgagtggcagggcct

SEQ ID NO: 35440 - DNA, 16 bp, Artificial
  oligonucleotide probe
tggcacgcgagccagg

SEQ ID NO: 35441 - DNA, 16 bp, Artificial
  oligonucleotide probe
gcagcctctggccgag

SEQ ID NO: 35442 - DNA, 16 bp, Artificial
  oligonucleotide probe
ggtccggagcagacgc

SEQ ID NO: 35443 - DNA, 16 bp, Artificial
  oligonucleotide probe
acgcgagcgggtgcag

SEQ ID NO: 35444 - DNA, 16 bp, Artificial
  oligonucleotide probe
accacggaagcgcgga

SEQ ID NO: 35445 - DNA, 16 bp, Artificial
  oligonucleotide probe
gcagcctctggccgag

SEQ ID NO: 35446 - DNA, 16 bp, Artificial
  oligonucleotide probe
ggtccggagcagacgc

SEQ ID NO: 35447 - DNA, 16 bp, Artificial
  oligonucleotide probe
gcagcctctggccgag

SEQ ID NO: 35448 - DNA, 16 bp, Artificial
  oligonucleotide probe
ggtccggagcagacgc

SEQ ID NO: 35449 - DNA, 16 bp, Artificial
  oligonucleotide probe
gcctgggtcaccacgc

SEQ ID NO: 35450 - DNA, 16 bp, Artificial
  oligonucleotide probe
cctccgaggacgcgga

SEQ ID NO: 35451 - DNA, 16 bp, Artificial
  oligonucleotide probe
gcctgggtcaccacgc

SEQ ID NO: 35452 - DNA, 16 bp, Artificial
  oligonucleotide probe
cctccgaggacgcgga

SEQ ID NO: 35453 - DNA, 16 bp, Artificial
  oligonucleotide probe
caggagcgggaagcga

SEQ ID NO: 35454 - DNA, 16 bp, Artificial
  oligonucleotide probe
gcctgtgggtccgcga

SEQ ID NO: 35455 - DNA, 16 bp, Artificial
  oligonucleotide probe
tggcgggtgacggtgg

SEQ ID NO: 35456 - DNA, 16 bp, Artificial
  oligonucleotide probe
gtggcaggagcgacgc

SEQ ID NO: 35457 - DNA, 16 bp, Artificial
  oligonucleotide probe
gtggcaggagcgacgc

SEQ ID NO: 35458 - DNA, 16 bp, Artificial
  oligonucleotide probe
cctccgaggacgcgga

SEQ ID NO: 35459 - DNA, 16 bp, Artificial
  oligonucleotide probe
tggcggtcgcctcgag

SEQ ID NO: 35460 - DNA, 16 bp, Artificial
  oligonucleotide probe
tggcgggtgacggtgg

SEQ ID NO: 35461 - DNA, 16 bp, Artificial
  oligonucleotide probe
gcctgtgggtccgcga

SEQ ID NO: 35462 - DNA, 16 bp, Artificial
  oligonucleotide probe
ggtccggagcagacgc

SEQ ID NO: 35463 - DNA, 16 bp, Artificial
  oligonucleotide probe
gtggcaggagcgacgc

SEQ ID NO: 35464 - DNA, 16 bp, Artificial
  oligonucleotide probe
tggcacgcgagccagg

SEQ ID NO: 35465 - DNA, 16 bp, Artificial
  oligonucleotide probe
gagcgcctcctcgagc

SEQ ID NO: 35466 - DNA, 16 bp, Artificial
  oligonucleotide probe
agcggtccgcgagagc

SEQ ID NO: 35467 - DNA, 16 bp, Artificial
  oligonucleotide probe
caggggaagggtcgga

SEQ ID NO: 35468 - DNA, 16 bp, Artificial
  oligonucleotide probe
gtggcggaggtcggaa

SEQ ID NO: 35469 - DNA, 16 bp, Artificial
  oligonucleotide probe
caccgcgaggtcacgc

SEQ ID NO: 35470 - DNA, 16 bp, Artificial
  oligonucleotide probe
gcgacgagcgagccaa

SEQ ID NO: 35471 - DNA, 16 bp, Artificial
  oligonucleotide probe
gcgaagcggcgaggtc

SEQ ID NO: 35472 - DNA, 16 bp, Artificial
  oligonucleotide probe
gacggacgacgcgtgg

SEQ ID NO: 35473 - DNA, 16 bp, Artificial
  oligonucleotide probe
gtggcaggagcgacgc

SEQ ID NO: 35474 - DNA, 16 bp, Artificial
  oligonucleotide probe
tggcgggtgacggtgg

SEQ ID NO: 35475 - DNA, 16 bp, Artificial
  oligonucleotide probe
gtggcaggagcgacgc

SEQ ID NO: 35476 - DNA, 16 bp, Artificial
  oligonucleotide probe
agcgccaatcacgggt

SEQ ID NO: 35477 - DNA, 16 bp, Artificial
  oligonucleotide probe
tggcggtcgcctcgag

SEQ ID NO: 35478 - DNA, 16 bp, Artificial
  oligonucleotide probe
tggcgtgggggtccaa

SEQ ID NO: 35479 - DNA, 16 bp, Artificial
  oligonucleotide probe
accatggcacgcgacg

SEQ ID NO: 35480 - DNA, 16 bp, Artificial
  oligonucleotide probe
gcctgggtcaccacgc

SEQ ID NO: 35481 - DNA, 16 bp, Artificial
  oligonucleotide probe
cctccgaggacgcgga

SEQ ID NO: 35482 - DNA, 16 bp, Artificial
  oligonucleotide probe
caccgggtggtcagcg

SEQ ID NO: 35483 - DNA, 16 bp, Artificial
  oligonucleotide probe
acgcaccagtcccgga

SEQ ID NO: 35484 - DNA, 16 bp, Artificial
  oligonucleotide probe
gcgacgagcgagccaa

SEQ ID NO: 35485 - DNA, 16 bp, Artificial
  oligonucleotide probe
gcgaagcggcgaggtc

SEQ ID NO: 35486 - DNA, 16 bp, Artificial
  oligonucleotide probe
gcctgggtcaccacgc

SEQ ID NO: 35487 - DNA, 16 bp, Artificial
  oligonucleotide probe
ggaaagcggcctggaa

SEQ ID NO: 35488 - DNA, 16 bp, Artificial
  oligonucleotide probe
gcctagcgcctcgacg

SEQ ID NO: 35489 - DNA, 16 bp, Artificial
  oligonucleotide probe
gcctcggagacggcag

SEQ ID NO: 35490 - DNA, 16 bp, Artificial
  oligonucleotide probe
gacgcaggcggagggt

SEQ ID NO: 35491 - DNA, 16 bp, Artificial
  oligonucleotide probe
tggcgggtgacggtgg

SEQ ID NO: 35492 - DNA, 16 bp, Artificial
  oligonucleotide probe
caccgcgaggtcacgc

SEQ ID NO: 35493 - DNA, 16 bp, Artificial
  oligonucleotide probe
gtccacgctggcgacg

SEQ ID NO: 35494 - DNA, 16 bp, Artificial
  oligonucleotide probe
acgcgagcgggtgcag

SEQ ID NO: 35495 - DNA, 16 bp, Artificial
  oligonucleotide probe
accacggaagcgcgga

SEQ ID NO: 35496 - DNA, 16 bp, Artificial
  oligonucleotide probe
caccgacgggaaacgc

SEQ ID NO: 35497 - DNA, 16 bp, Artificial
  oligonucleotide probe
accacggaagcgcgga

SEQ ID NO: 35498 - DNA, 16 bp, Artificial
  oligonucleotide probe
gagcgcgacacccagg

SEQ ID NO: 35499 - DNA, 16 bp, Artificial
  oligonucleotide probe
cctccgaggacgcgga

SEQ ID NO: 35500 - DNA, 16 bp, Artificial
  oligonucleotide probe
gcgacgagcgagccaa

SEQ ID NO: 35501 - DNA, 16 bp, Artificial
  oligonucleotide probe
caggagcgggaagcga

SEQ ID NO: 35502 - DNA, 16 bp, Artificial
  oligonucleotide probe
gtccacgctggcgacg

SEQ ID NO: 35503 - DNA, 16 bp, Artificial
  oligonucleotide probe
gcaggcagccaatggc

SEQ ID NO: 35504 - DNA, 16 bp, Artificial
  oligonucleotide probe
cctccgaggacgcgga

SEQ ID NO: 35505 - DNA, 16 bp, Artificial
  oligonucleotide probe
gagcgcctcctcgagc

SEQ ID NO: 35506 - DNA, 16 bp, Artificial
  oligonucleotide probe
gcctgtgggtccgcga

SEQ ID NO: 35507 - DNA, 16 bp, Artificial
  oligonucleotide probe
accacggaagcgcgga

SEQ ID NO: 35508 - DNA, 16 bp, Artificial
  oligonucleotide probe
gacggacgacgcgtgg

SEQ ID NO: 35509 - DNA, 16 bp, Artificial
  oligonucleotide probe
gtggcaggagcgacgc

SEQ ID NO: 35510 - DNA, 16 bp, Artificial
  oligonucleotide probe
accacggaagcgcgga

SEQ ID NO: 35511 - DNA, 16 bp, Artificial
  oligonucleotide probe
ggtccggagcagacgc

SEQ ID NO: 35512 - DNA, 16 bp, Artificial
  oligonucleotide probe
ggtccggagcagacgc

SEQ ID NO: 35513 - DNA, 16 bp, Artificial
  oligonucleotide probe
gcgagtggcagggcct

SEQ ID NO: 35514 - DNA, 16 bp, Artificial
  oligonucleotide probe
gcaggtggtggcgagc

SEQ ID NO: 35515 - DNA, 16 bp, Artificial
  oligonucleotide probe
tggcgggtgacggtgg

SEQ ID NO: 35516 - DNA, 16 bp, Artificial
  oligonucleotide probe
ggtccggagcagacgc

SEQ ID NO: 35517 - DNA, 16 bp, Artificial
  oligonucleotide probe
gcgagtggcagggcct

SEQ ID NO: 35518 - DNA, 16 bp, Artificial
  oligonucleotide probe
gcaggtggtggcgagc

SEQ ID NO: 35519 - DNA, 16 bp, Artificial
  oligonucleotide probe
tggcgggtgacggtgg

SEQ ID NO: 35520 - DNA, 16 bp, Artificial
  oligonucleotide probe
ggtccggagcagacgc

SEQ ID NO: 35521 - DNA, 16 bp, Artificial
  oligonucleotide probe
gtggcggaggtcggaa

SEQ ID NO: 35522 - DNA, 16 bp, Artificial
  oligonucleotide probe
cctccgaggacgcgga

SEQ ID NO: 35523 - DNA, 16 bp, Artificial
  oligonucleotide probe
gagcgcctcctcgagc

SEQ ID NO: 35524 - DNA, 16 bp, Artificial
  oligonucleotide probe
agcgccaatcacgggt

SEQ ID NO: 35525 - DNA, 16 bp, Artificial
  oligonucleotide probe
tggcggtcgcctcgag

SEQ ID NO: 35526 - DNA, 16 bp, Artificial
  oligonucleotide probe
gagcgcctcctcgagc

SEQ ID NO: 35527 - DNA, 16 bp, Artificial
  oligonucleotide probe
tggcacgcgagccagg

SEQ ID NO: 35528 - DNA, 16 bp, Artificial
  oligonucleotide probe
gtggcaggagcgacgc

SEQ ID NO: 35529 - DNA, 16 bp, Artificial
  oligonucleotide probe
cctccgaggacgcgga

SEQ ID NO: 35530 - DNA, 16 bp, Artificial
  oligonucleotide probe
gcctgggtcaccacgc

SEQ ID NO: 35531 - DNA, 16 bp, Artificial
  oligonucleotide probe
ggaaagcggcctggaa

SEQ ID NO: 35532 - DNA, 16 bp, Artificial
  oligonucleotide probe
agcggtccgcgagagc

SEQ ID NO: 35533 - DNA, 16 bp, Artificial
  oligonucleotide probe
caggggaagggtcgga

SEQ ID NO: 35534 - DNA, 16 bp, Artificial
  oligonucleotide probe
gagcgcctcctcgagc

SEQ ID NO: 35535 - DNA, 16 bp, Artificial
  oligonucleotide probe
tggcacgcgagccagg

SEQ ID NO: 35536 - DNA, 16 bp, Artificial
  oligonucleotide probe
gcaggtggtggcgagc

SEQ ID NO: 35537 - DNA, 16 bp, Artificial
  oligonucleotide probe
gacggacgacgcgtgg

SEQ ID NO: 35538 - DNA, 16 bp, Artificial
  oligonucleotide probe
caggagcgggaagcga

SEQ ID NO: 35539 - DNA, 16 bp, Artificial
  oligonucleotide probe
gcctgtgggtccgcga

SEQ ID NO: 35540 - DNA, 16 bp, Artificial
  oligonucleotide probe
gacggacgacgcgtgg

SEQ ID NO: 35541 - DNA, 16 bp, Artificial
  oligonucleotide probe
gcctgggtcaccacgc

SEQ ID NO: 35542 - DNA, 16 bp, Artificial
  oligonucleotide probe
caggagcgggaagcga

SEQ ID NO: 35543 - DNA, 16 bp, Artificial
  oligonucleotide probe
gcctgtgggtccgcga

SEQ ID NO: 35544 - DNA, 16 bp, Artificial
  oligonucleotide probe
tggcgtgggggtccaa

SEQ ID NO: 35545 - DNA, 16 bp, Artificial
  oligonucleotide probe
accatggcacgcgacg

SEQ ID NO: 35546 - DNA, 16 bp, Artificial
  oligonucleotide probe
accacggaagcgcgga

SEQ ID NO: 35547 - DNA, 16 bp, Artificial
  oligonucleotide probe
ggtccggagcagacgc

SEQ ID NO: 35548 - DNA, 16 bp, Artificial
  oligonucleotide probe
gacggacgacgcgtgg

SEQ ID NO: 35549 - DNA, 16 bp, Artificial
  oligonucleotide probe
gcctgggtcaccacgc

SEQ ID NO: 35550 - DNA, 16 bp, Artificial
  oligonucleotide probe
agcgccaatcacgggt

SEQ ID NO: 35551 - DNA, 16 bp, Artificial
  oligonucleotide probe
tggcggtcgcctcgag

SEQ ID NO: 35552 - DNA, 16 bp, Artificial
  oligonucleotide probe
acgcgagcgggtgcag

SEQ ID NO: 35553 - DNA, 16 bp, Artificial
  oligonucleotide probe
gcagcctctggccgag

SEQ ID NO: 35554 - DNA, 16 bp, Artificial
  oligonucleotide probe
gcgacgagcgagccaa

SEQ ID NO: 35555 - DNA, 16 bp, Artificial
  oligonucleotide probe
gcgaagcggcgaggtc

SEQ ID NO: 35556 - DNA, 16 bp, Artificial
  oligonucleotide probe
acgcgagcgggtgcag

SEQ ID NO: 35557 - DNA, 16 bp, Artificial
  oligonucleotide probe
gcagcctctggccgag

SEQ ID NO: 35558 - DNA, 16 bp, Artificial
  oligonucleotide probe
acgcgagcgggtgcag

SEQ ID NO: 35559 - DNA, 16 bp, Artificial
  oligonucleotide probe
gcagcctctggccgag

SEQ ID NO: 35560 - DNA, 16 bp, Artificial
  oligonucleotide probe
gcctagcgcctcgacg

SEQ ID NO: 35561 - DNA, 16 bp, Artificial
  oligonucleotide probe
gcctcggagacggcag

SEQ ID NO: 35562 - DNA, 16 bp, Artificial
  oligonucleotide probe
caccgggtggtcagcg

SEQ ID NO: 35563 - DNA, 16 bp, Artificial
  oligonucleotide probe
acgcaccagtcccgga

SEQ ID NO: 35564 - DNA, 16 bp, Artificial
  oligonucleotide probe
gcgacgagcgagccaa

SEQ ID NO: 35565 - DNA, 16 bp, Artificial
  oligonucleotide probe
caggagcgggaagcga

SEQ ID NO: 35566 - DNA, 16 bp, Artificial
  oligonucleotide probe
caggagcgggaagcga

SEQ ID NO: 35567 - DNA, 16 bp, Artificial
  oligonucleotide probe
acgcgagcgggtgcag

SEQ ID NO: 35568 - DNA, 16 bp, Artificial
  oligonucleotide probe
gcaggtggtggcgagc

SEQ ID NO: 35569 - DNA, 16 bp, Artificial
  oligonucleotide probe
tggcgggtgacggtgg

SEQ ID NO: 35570 - DNA, 16 bp, Artificial
  oligonucleotide probe
gcgaagcggcgaggtc

SEQ ID NO: 35571 - DNA, 16 bp, Artificial
  oligonucleotide probe
gcctgtgggtccgcga

SEQ ID NO: 35572 - DNA, 16 bp, Artificial
  oligonucleotide probe
agcgccaatcacgggt

SEQ ID NO: 35573 - DNA, 16 bp, Artificial
  oligonucleotide probe
gcaggtggtggcgagc

SEQ ID NO: 35574 - DNA, 16 bp, Artificial
  oligonucleotide probe
gcgacgagcgagccaa

SEQ ID NO: 35575 - DNA, 16 bp, Artificial
  oligonucleotide probe
acgcgagcgggtgcag

SEQ ID NO: 35576 - DNA, 16 bp, Artificial
  oligonucleotide probe
gacggcgagtgggcag

SEQ ID NO: 35577 - DNA, 16 bp, Artificial
  oligonucleotide probe
agcgccaatcacgggt

SEQ ID NO: 35578 - DNA, 16 bp, Artificial
  oligonucleotide probe
gcctgtgggtccgcga

SEQ ID NO: 35579 - DNA, 16 bp, Artificial
  oligonucleotide probe
ggtccggagcagacgc

SEQ ID NO: 35580 - DNA, 16 bp, Artificial
  oligonucleotide probe
tggcggtcgcctcgag

SEQ ID NO: 35581 - DNA, 16 bp, Artificial
  oligonucleotide probe
gtggcaggagcgacgc

SEQ ID NO: 35582 - DNA, 16 bp, Artificial
  oligonucleotide probe
gcgacgagcgagccaa

SEQ ID NO: 35583 - DNA, 16 bp, Artificial
  oligonucleotide probe
gacggcgagtgggcag

SEQ ID NO: 35584 - DNA, 16 bp, Artificial
  oligonucleotide probe
gcaggtggtggcgagc

SEQ ID NO: 35585 - DNA, 16 bp, Artificial
  oligonucleotide probe
gcctgggtcaccacgc

SEQ ID NO: 35586 - DNA, 16 bp, Artificial
  oligonucleotide probe
gagcgcgacacccagg

SEQ ID NO: 35587 - DNA, 16 bp, Artificial
  oligonucleotide probe
gacgcaggcggagggt

SEQ ID NO: 35588 - DNA, 16 bp, Artificial
  oligonucleotide probe
caccgacgggaaacgc

SEQ ID NO: 35589 - DNA, 16 bp, Artificial
  oligonucleotide probe
gcctgtgggtccgcga

SEQ ID NO: 35590 - DNA, 16 bp, Artificial
  oligonucleotide probe
gcaggcagccaatggc

SEQ ID NO: 35591 - DNA, 16 bp, Artificial
  oligonucleotide probe
gagcgcctcctcgagc

SEQ ID NO: 35592 - DNA, 16 bp, Artificial
  oligonucleotide probe
tggcacgcgagccagg

SEQ ID NO: 35593 - DNA, 16 bp, Artificial
  oligonucleotide probe
gtggcaggagcgacgc

SEQ ID NO: 35594 - DNA, 16 bp, Artificial
  oligonucleotide probe
gcgagtggcagggcct

SEQ ID NO: 35595 - DNA, 16 bp, Artificial
  oligonucleotide probe
ggaaagcggcctggaa

SEQ ID NO: 35596 - DNA, 16 bp, Artificial
  oligonucleotide probe
agcggcgagagcgtcc

SEQ ID NO: 35597 - DNA, 16 bp, Artificial
  oligonucleotide probe
tggcaccagcaggggt

SEQ ID NO: 35598 - DNA, 16 bp, Artificial
  oligonucleotide probe
agcgcaccgacgacgc

SEQ ID NO: 35599 - DNA, 16 bp, Artificial
  oligonucleotide probe
acgcccaacagggagc

SEQ ID NO: 35600 - DNA, 16 bp, Artificial
  oligonucleotide probe
tgctcggatgctgcga

SEQ ID NO: 35601 - DNA, 16 bp, Artificial
  oligonucleotide probe
gagcgagcagcgggtc

SEQ ID NO: 35602 - DNA, 16 bp, Artificial
  oligonucleotide probe
tgctcggatgctgcga

SEQ ID NO: 35603 - DNA, 16 bp, Artificial
  oligonucleotide probe
gagcgagcagcgggtc

SEQ ID NO: 35604 - DNA, 16 bp, Artificial
  oligonucleotide probe
gtgggggtgcagggaa

SEQ ID NO: 35605 - DNA, 16 bp, Artificial
  oligonucleotide probe
cacccgagagcggtgg

SEQ ID NO: 35606 - DNA, 16 bp, Artificial
  oligonucleotide probe
cgagcaccgagccgga

SEQ ID NO: 35607 - DNA, 16 bp, Artificial
  oligonucleotide probe
gcgacagggcctgcct

SEQ ID NO: 35608 - DNA, 16 bp, Artificial
  oligonucleotide probe
cgagcaccgagccgga

SEQ ID NO: 35609 - DNA, 16 bp, Artificial
  oligonucleotide probe
gcgacagggcctgcct

SEQ ID NO: 35610 - DNA, 16 bp, Artificial
  oligonucleotide probe
caggcctccctcgcga

SEQ ID NO: 35611 - DNA, 16 bp, Artificial
  oligonucleotide probe
cggagcaggagcggaa

SEQ ID NO: 35612 - DNA, 16 bp, Artificial
  oligonucleotide probe
tgctcggatgctgcga

SEQ ID NO: 35613 - DNA, 16 bp, Artificial
  oligonucleotide probe
gagcgagcagcgggtc

SEQ ID NO: 35614 - DNA, 16 bp, Artificial
  oligonucleotide probe
gtccgggtcaggcagg

SEQ ID NO: 35615 - DNA, 16 bp, Artificial
  oligonucleotide probe
acgcagcggggtgacg

SEQ ID NO: 35616 - DNA, 16 bp, Artificial
  oligonucleotide probe
agcgcaccgacgacgc

SEQ ID NO: 35617 - DNA, 16 bp, Artificial
  oligonucleotide probe
acgcccaacagggagc

SEQ ID NO: 35618 - DNA, 16 bp, Artificial
  oligonucleotide probe
agcgcaccgacgacgc

SEQ ID NO: 35619 - DNA, 16 bp, Artificial
  oligonucleotide probe
acgcccaacagggagc

SEQ ID NO: 35620 - DNA, 16 bp, Artificial
  oligonucleotide probe
gtgggggtgcagggaa

SEQ ID NO: 35621 - DNA, 16 bp, Artificial
  oligonucleotide probe
cacccgagagcggtgg

SEQ ID NO: 35622 - DNA, 16 bp, Artificial
  oligonucleotide probe
cgagcaccgagccgga

SEQ ID NO: 35623 - DNA, 16 bp, Artificial
  oligonucleotide probe
gcgacagggcctgcct

SEQ ID NO: 35624 - DNA, 16 bp, Artificial
  oligonucleotide probe
gtggcgagcctcgggt

SEQ ID NO: 35625 - DNA, 16 bp, Artificial
  oligonucleotide probe
cctcgtggcggacgga

SEQ ID NO: 35626 - DNA, 16 bp, Artificial
  oligonucleotide probe
agcgcaccgacgacgc

SEQ ID NO: 35627 - DNA, 16 bp, Artificial
  oligonucleotide probe
acgcccaacagggagc

SEQ ID NO: 35628 - DNA, 16 bp, Artificial
  oligonucleotide probe
cgagcaccgagccgga

SEQ ID NO: 35629 - DNA, 16 bp, Artificial
  oligonucleotide probe
gcgacagggcctgcct

SEQ ID NO: 35630 - DNA, 16 bp, Artificial
  oligonucleotide probe
gtgggggtgcagggaa

SEQ ID NO: 35631 - DNA, 16 bp, Artificial
  oligonucleotide probe
cacccgagagcggtgg

SEQ ID NO: 35632 - DNA, 16 bp, Artificial
  oligonucleotide probe
cgagcaccgagccgga

SEQ ID NO: 35633 - DNA, 16 bp, Artificial
  oligonucleotide probe
gcgacagggcctgcct

SEQ ID NO: 35634 - DNA, 16 bp, Artificial
  oligonucleotide probe
cgagcaccgagccgga

SEQ ID NO: 35635 - DNA, 16 bp, Artificial
  oligonucleotide probe
gcgacagggcctgcct

SEQ ID NO: 35636 - DNA, 16 bp, Artificial
  oligonucleotide probe
gtggcgagcctcgggt

SEQ ID NO: 35637 - DNA, 16 bp, Artificial
  oligonucleotide probe
cctcgtggcggacgga

SEQ ID NO: 35638 - DNA, 16 bp, Artificial
  oligonucleotide probe
cgagcaccgagccgga

SEQ ID NO: 35639 - DNA, 16 bp, Artificial
  oligonucleotide probe
gcgacagggcctgcct

SEQ ID NO: 35640 - DNA, 16 bp, Artificial
  oligonucleotide probe
gtgggggtgcagggaa

SEQ ID NO: 35641 - DNA, 16 bp, Artificial
  oligonucleotide probe
cacccgagagcggtgg

SEQ ID NO: 35642 - DNA, 16 bp, Artificial
  oligonucleotide probe
tgctcggatgctgcga

SEQ ID NO: 35643 - DNA, 16 bp, Artificial
  oligonucleotide probe
gagcgagcagcgggtc

SEQ ID NO: 35644 - DNA, 16 bp, Artificial
  oligonucleotide probe
gcctcaggacgcacgc

SEQ ID NO: 35645 - DNA, 16 bp, Artificial
  oligonucleotide probe
gcgacctcacgcgcag

SEQ ID NO: 35646 - DNA, 16 bp, Artificial
  oligonucleotide probe
tgctcggatgctgcga

SEQ ID NO: 35647 - DNA, 16 bp, Artificial
  oligonucleotide probe
gagcgagcagcgggtc

SEQ ID NO: 35648 - DNA, 16 bp, Artificial
  oligonucleotide probe
gtgggggtgcagggaa

SEQ ID NO: 35649 - DNA, 16 bp, Artificial
  oligonucleotide probe
cacccgagagcggtgg

SEQ ID NO: 35650 - DNA, 16 bp, Artificial
  oligonucleotide probe
cctcgtggcggacgga

SEQ ID NO: 35651 - DNA, 16 bp, Artificial
  oligonucleotide probe
gcgacagggcctgcct

SEQ ID NO: 35652 - DNA, 16 bp, Artificial
  oligonucleotide probe
agcggcgagagcgtcc

SEQ ID NO: 35653 - DNA, 16 bp, Artificial
  oligonucleotide probe
tggcaccagcaggggt

SEQ ID NO: 35654 - DNA, 16 bp, Artificial
  oligonucleotide probe
cggagcctgagcgtgg

SEQ ID NO: 35655 - DNA, 16 bp, Artificial
  oligonucleotide probe
actgcggacgaggcct

SEQ ID NO: 35656 - DNA, 16 bp, Artificial
  oligonucleotide probe
caggcctccctcgcga

SEQ ID NO: 35657 - DNA, 16 bp, Artificial
  oligonucleotide probe
cggagcaggagcggaa

SEQ ID NO: 35658 - DNA, 16 bp, Artificial
  oligonucleotide probe
caggcctccctcgcga

SEQ ID NO: 35659 - DNA, 16 bp, Artificial
  oligonucleotide probe
cggagcaggagcggaa

SEQ ID NO: 35660 - DNA, 16 bp, Artificial
  oligonucleotide probe
gtggcgagcctcgggt

SEQ ID NO: 35661 - DNA, 16 bp, Artificial
  oligonucleotide probe
cctcgtggcggacgga

SEQ ID NO: 35662 - DNA, 16 bp, Artificial
  oligonucleotide probe
gtggcgagcctcgggt

SEQ ID NO: 35663 - DNA, 16 bp, Artificial
  oligonucleotide probe
cctcgtggcggacgga

SEQ ID NO: 35664 - DNA, 16 bp, Artificial
  oligonucleotide probe
caggcctccctcgcga

SEQ ID NO: 35665 - DNA, 16 bp, Artificial
  oligonucleotide probe
cggagcaggagcggaa

SEQ ID NO: 35666 - DNA, 16 bp, Artificial
  oligonucleotide probe
gtgggggtgcagggaa

SEQ ID NO: 35667 - DNA, 16 bp, Artificial
  oligonucleotide probe
cacccgagagcggtgg

SEQ ID NO: 35668 - DNA, 16 bp, Artificial
  oligonucleotide probe
agcggcgagagcgtcc

SEQ ID NO: 35669 - DNA, 16 bp, Artificial
  oligonucleotide probe
tggcaccagcaggggt

SEQ ID NO: 35670 - DNA, 16 bp, Artificial
  oligonucleotide probe
gggtacgcgacgcgag

SEQ ID NO: 35671 - DNA, 16 bp, Artificial
  oligonucleotide probe
gagcgacgcgagagcg

SEQ ID NO: 35672 - DNA, 16 bp, Artificial
  oligonucleotide probe
gggtacgcgacgcgag

SEQ ID NO: 35673 - DNA, 16 bp, Artificial
  oligonucleotide probe
gagcgacgcgagagcg

SEQ ID NO: 35674 - DNA, 16 bp, Artificial
  oligonucleotide probe
gtggcgagcctcgggt

SEQ ID NO: 35675 - DNA, 16 bp, Artificial
  oligonucleotide probe
cctcgtggcggacgga

SEQ ID NO: 35676 - DNA, 16 bp, Artificial
  oligonucleotide probe
cggagcctgagcgtgg

SEQ ID NO: 35677 - DNA, 16 bp, Artificial
  oligonucleotide probe
actgcggacgaggcct

SEQ ID NO: 35678 - DNA, 16 bp, Artificial
  oligonucleotide probe
agcggcgagagcgtcc

SEQ ID NO: 35679 - DNA, 16 bp, Artificial
  oligonucleotide probe
tggcaccagcaggggt

SEQ ID NO: 35680 - DNA, 16 bp, Artificial
  oligonucleotide probe
gcctcaggacgcacgc

SEQ ID NO: 35681 - DNA, 16 bp, Artificial
  oligonucleotide probe
gcgacctcacgcgcag

SEQ ID NO: 35682 - DNA, 16 bp, Artificial
  oligonucleotide probe
gcctcaggacgcacgc

SEQ ID NO: 35683 - DNA, 16 bp, Artificial
  oligonucleotide probe
gcgacctcacgcgcag

SEQ ID NO: 35684 - DNA, 16 bp, Artificial
  oligonucleotide probe
gcctcaggacgcacgc

SEQ ID NO: 35685 - DNA, 16 bp, Artificial
  oligonucleotide probe
gcgacctcacgcgcag

SEQ ID NO: 35686 - DNA, 16 bp, Artificial
  oligonucleotide probe
caggcctccctcgcga

SEQ ID NO: 35687 - DNA, 16 bp, Artificial
  oligonucleotide probe
cggagcaggagcggaa

SEQ ID NO: 35688 - DNA, 16 bp, Artificial
  oligonucleotide probe
gtgggggtgcagggaa

SEQ ID NO: 35689 - DNA, 16 bp, Artificial
  oligonucleotide probe
cacccgagagcggtgg

SEQ ID NO: 35690 - DNA, 16 bp, Artificial
  oligonucleotide probe
tgctcggatgctgcga

SEQ ID NO: 35691 - DNA, 16 bp, Artificial
  oligonucleotide probe
gagcgagcagcgggtc

SEQ ID NO: 35692 - DNA, 16 bp, Artificial
  oligonucleotide probe
agcgcaccgacgacgc

SEQ ID NO: 35693 - DNA, 16 bp, Artificial
  oligonucleotide probe
acgcccaacagggagc

SEQ ID NO: 35694 - DNA, 16 bp, Artificial
  oligonucleotide probe
cgagcaccgagccgga

SEQ ID NO: 35695 - DNA, 16 bp, Artificial
  oligonucleotide probe
gcgacagggcctgcct

SEQ ID NO: 35696 - DNA, 16 bp, Artificial
  oligonucleotide probe
agcggcgagagcgtcc

SEQ ID NO: 35697 - DNA, 16 bp, Artificial
  oligonucleotide probe
tggcaccagcaggggt

SEQ ID NO: 35698 - DNA, 16 bp, Artificial
  oligonucleotide probe
gtgggggtgcagggaa

SEQ ID NO: 35699 - DNA, 16 bp, Artificial
  oligonucleotide probe
cacccgagagcggtgg

SEQ ID NO: 35700 - DNA, 16 bp, Artificial
  oligonucleotide probe
agcggcgagagcgtcc

SEQ ID NO: 35701 - DNA, 16 bp, Artificial
  oligonucleotide probe
tggcaccagcaggggt

SEQ ID NO: 35702 - DNA, 16 bp, Artificial
  oligonucleotide probe
agcggcgagagcgtcc

SEQ ID NO: 35703 - DNA, 16 bp, Artificial
  oligonucleotide probe
tggcaccagcaggggt

SEQ ID NO: 35704 - DNA, 16 bp, Artificial
  oligonucleotide probe
agcggcgagagcgtcc

SEQ ID NO: 35705 - DNA, 16 bp, Artificial
  oligonucleotide probe
tggcaccagcaggggt

SEQ ID NO: 35706 - DNA, 16 bp, Artificial
  oligonucleotide probe
tgctcggatgctgcga

SEQ ID NO: 35707 - DNA, 16 bp, Artificial
  oligonucleotide probe
gagcgagcagcgggtc

SEQ ID NO: 35708 - DNA, 16 bp, Artificial
  oligonucleotide probe
gtgggggtgcagggaa

SEQ ID NO: 35709 - DNA, 16 bp, Artificial
  oligonucleotide probe
cacccgagagcggtgg

SEQ ID NO: 35710 - DNA, 16 bp, Artificial
  oligonucleotide probe
caggcctccctcgcga

SEQ ID NO: 35711 - DNA, 16 bp, Artificial
  oligonucleotide probe
cggagcaggagcggaa

SEQ ID NO: 35712 - DNA, 16 bp, Artificial
  oligonucleotide probe
agcggcgagagcgtcc

SEQ ID NO: 35713 - DNA, 16 bp, Artificial
  oligonucleotide probe
tggcaccagcaggggt

SEQ ID NO: 35714 - DNA, 16 bp, Artificial
  oligonucleotide probe
agcggcgagagcgtcc

SEQ ID NO: 35715 - DNA, 16 bp, Artificial
  oligonucleotide probe
tggcaccagcaggggt

SEQ ID NO: 35716 - DNA, 16 bp, Artificial
  oligonucleotide probe
cgagcaccgagccgga

SEQ ID NO: 35717 - DNA, 16 bp, Artificial
  oligonucleotide probe
gcgacagggcctgcct

SEQ ID NO: 35718 - DNA, 16 bp, Artificial
  oligonucleotide probe
tgctcggatgctgcga

SEQ ID NO: 35719 - DNA, 16 bp, Artificial
  oligonucleotide probe
gagcgagcagcgggtc

SEQ ID NO: 35720 - DNA, 16 bp, Artificial
  oligonucleotide probe
gtggcgagcctcgggt

SEQ ID NO: 35721 - DNA, 16 bp, Artificial
  oligonucleotide probe
cctcgtggcggacgga

SEQ ID NO: 35722 - DNA, 16 bp, Artificial
  oligonucleotide probe
cgagcaccgagccgga

SEQ ID NO: 35723 - DNA, 16 bp, Artificial
  oligonucleotide probe
gcgacagggcctgcct

SEQ ID NO: 35724 - DNA, 16 bp, Artificial
  oligonucleotide probe
gtgggggtgcagggaa

SEQ ID NO: 35725 - DNA, 16 bp, Artificial
  oligonucleotide probe
cacccgagagcggtgg

SEQ ID NO: 35726 - DNA, 16 bp, Artificial
  oligonucleotide probe
gtgggggtgcagggaa

SEQ ID NO: 35727 - DNA, 16 bp, Artificial
  oligonucleotide probe
cacccgagagcggtgg

SEQ ID NO: 35728 - DNA, 16 bp, Artificial
  oligonucleotide probe
agcggcgagagcgtcc

SEQ ID NO: 35729 - DNA, 16 bp, Artificial
  oligonucleotide probe
tggcaccagcaggggt

SEQ ID NO: 35730 - DNA, 16 bp, Artificial
  oligonucleotide probe
cctcgtggcggacgga

SEQ ID NO: 35731 - DNA, 16 bp, Artificial
  oligonucleotide probe
gcgacagggcctgcct

SEQ ID NO: 35732 - DNA, 16 bp, Artificial
  oligonucleotide probe
caggcctccctcgcga

SEQ ID NO: 35733 - DNA, 16 bp, Artificial
  oligonucleotide probe
cggagcaggagcggaa

SEQ ID NO: 35734 - DNA, 16 bp, Artificial
  oligonucleotide probe
cgagcaccgagccgga

SEQ ID NO: 35735 - DNA, 16 bp, Artificial
  oligonucleotide probe
gcgacagggcctgcct

SEQ ID NO: 35736 - DNA, 16 bp, Artificial
  oligonucleotide probe
caggcctccctcgcga

SEQ ID NO: 35737 - DNA, 16 bp, Artificial
  oligonucleotide probe
cggagcaggagcggaa

SEQ ID NO: 35738 - DNA, 16 bp, Artificial
  oligonucleotide probe
agcggcgagagcgtcc

SEQ ID NO: 35739 - DNA, 16 bp, Artificial
  oligonucleotide probe
tggcaccagcaggggt

SEQ ID NO: 35740 - DNA, 16 bp, Artificial
  oligonucleotide probe
tgctcggatgctgcga

SEQ ID NO: 35741 - DNA, 16 bp, Artificial
  oligonucleotide probe
gagcgagcagcgggtc

SEQ ID NO: 35742 - DNA, 16 bp, Artificial
  oligonucleotide probe
gtggcgagcctcgggt

SEQ ID NO: 35743 - DNA, 16 bp, Artificial
  oligonucleotide probe
cctcgtggcggacgga

SEQ ID NO: 35744 - DNA, 16 bp, Artificial
  oligonucleotide probe
gtgggggtgcagggaa

SEQ ID NO: 35745 - DNA, 16 bp, Artificial
  oligonucleotide probe
cacccgagagcggtgg

SEQ ID NO: 35746 - DNA, 16 bp, Artificial
  oligonucleotide probe
gtggcgagcctcgggt

SEQ ID NO: 35747 - DNA, 16 bp, Artificial
  oligonucleotide probe
cctcgtggcggacgga

SEQ ID NO: 35748 - DNA, 16 bp, Artificial
  oligonucleotide probe
cgagcaccgagccgga

SEQ ID NO: 35749 - DNA, 16 bp, Artificial
  oligonucleotide probe
gcgacagggcctgcct

SEQ ID NO: 35750 - DNA, 16 bp, Artificial
  oligonucleotide probe
caggcctccctcgcga

SEQ ID NO: 35751 - DNA, 16 bp, Artificial
  oligonucleotide probe
cggagcaggagcggaa

SEQ ID NO: 35752 - DNA, 16 bp, Artificial
  oligonucleotide probe
gtggcgagcctcgggt

SEQ ID NO: 35753 - DNA, 16 bp, Artificial
  oligonucleotide probe
cctcgtggcggacgga

SEQ ID NO: 35754 - DNA, 16 bp, Artificial
  oligonucleotide probe
agcggcgagagcgtcc

SEQ ID NO: 35755 - DNA, 16 bp, Artificial
  oligonucleotide probe
tggcaccagcaggggt

SEQ ID NO: 35756 - DNA, 16 bp, Artificial
  oligonucleotide probe
cgagcaccgagccgga

SEQ ID NO: 35757 - DNA, 16 bp, Artificial
  oligonucleotide probe
gcgacagggcctgcct

SEQ ID NO: 35758 - DNA, 16 bp, Artificial
  oligonucleotide probe
gcctcaggacgcacgc

SEQ ID NO: 35759 - DNA, 16 bp, Artificial
  oligonucleotide probe
gcgacctcacgcgcag

SEQ ID NO: 35760 - DNA, 16 bp, Artificial
  oligonucleotide probe
tgctcggatgctgcga

SEQ ID NO: 35761 - DNA, 16 bp, Artificial
  oligonucleotide probe
gagcgagcagcgggtc

SEQ ID NO: 35762 - DNA, 16 bp, Artificial
  oligonucleotide probe
gtggcgagcctcgggt

SEQ ID NO: 35763 - DNA, 16 bp, Artificial
  oligonucleotide probe
cctcgtggcggacgga

SEQ ID NO: 35764 - DNA, 16 bp, Artificial
  oligonucleotide probe
agcggcgagagcgtcc

SEQ ID NO: 35765 - DNA, 16 bp, Artificial
  oligonucleotide probe
tggcaccagcaggggt

SEQ ID NO: 35766 - DNA, 16 bp, Artificial
  oligonucleotide probe
gcctcaggacgcacgc

SEQ ID NO: 35767 - DNA, 16 bp, Artificial
  oligonucleotide probe
gcgacctcacgcgcag

SEQ ID NO: 35768 - DNA, 16 bp, Artificial
  oligonucleotide probe
cagggcagggtcgggt

SEQ ID NO: 35769 - DNA, 16 bp, Artificial
  oligonucleotide probe
ggtcgcgacacctggc

SEQ ID NO: 35770 - DNA, 16 bp, Artificial
  oligonucleotide probe
agcgcaccgacgacgc

SEQ ID NO: 35771 - DNA, 16 bp, Artificial
  oligonucleotide probe
acgcccaacagggagc

SEQ ID NO: 35772 - DNA, 16 bp, Artificial
  oligonucleotide probe
gggtacgcgacgcgag

SEQ ID NO: 35773 - DNA, 16 bp, Artificial
  oligonucleotide probe
gagcgacgcgagagcg

SEQ ID NO: 35774 - DNA, 16 bp, Artificial
  oligonucleotide probe
gtggcgagcctcgggt

SEQ ID NO: 35775 - DNA, 16 bp, Artificial
  oligonucleotide probe
cctcgtggcggacgga

SEQ ID NO: 35776 - DNA, 16 bp, Artificial
  oligonucleotide probe
cggagcctgagcgtgg

SEQ ID NO: 35777 - DNA, 16 bp, Artificial
  oligonucleotide probe
actgcggacgaggcct

SEQ ID NO: 35778 - DNA, 16 bp, Artificial
  oligonucleotide probe
gggtacgcgacgcgag

SEQ ID NO: 35779 - DNA, 16 bp, Artificial
  oligonucleotide probe
gagcgacgcgagagcg

SEQ ID NO: 35780 - DNA, 16 bp, Artificial
  oligonucleotide probe
agcgcaccgacgacgc

SEQ ID NO: 35781 - DNA, 16 bp, Artificial
  oligonucleotide probe
acgcccaacagggagc

SEQ ID NO: 35782 - DNA, 16 bp, Artificial
  oligonucleotide probe
gcctcaggacgcacgc

SEQ ID NO: 35783 - DNA, 16 bp, Artificial
  oligonucleotide probe
gcgacctcacgcgcag

SEQ ID NO: 35784 - DNA, 16 bp, Artificial
  oligonucleotide probe
cgagcaccgagccgga

SEQ ID NO: 35785 - DNA, 16 bp, Artificial
  oligonucleotide probe
gcgacagggcctgcct

SEQ ID NO: 35786 - DNA, 16 bp, Artificial
  oligonucleotide probe
gtggcgagcctcgggt

SEQ ID NO: 35787 - DNA, 16 bp, Artificial
  oligonucleotide probe
cctcgtggcggacgga

SEQ ID NO: 35788 - DNA, 16 bp, Artificial
  oligonucleotide probe
gtggcgagcctcgggt

SEQ ID NO: 35789 - DNA, 16 bp, Artificial
  oligonucleotide probe
cctcgtggcggacgga

SEQ ID NO: 35790 - DNA, 16 bp, Artificial
  oligonucleotide probe
gtgggggtgcagggaa

SEQ ID NO: 35791 - DNA, 16 bp, Artificial
  oligonucleotide probe
cacccgagagcggtgg

SEQ ID NO: 35792 - DNA, 16 bp, Artificial
  oligonucleotide probe
agcggcgagagcgtcc

SEQ ID NO: 35793 - DNA, 16 bp, Artificial
  oligonucleotide probe
tggcaccagcaggggt

SEQ ID NO: 35794 - DNA, 16 bp, Artificial
  oligonucleotide probe
agcggcgagagcgtcc

SEQ ID NO: 35795 - DNA, 16 bp, Artificial
  oligonucleotide probe
tggcaccagcaggggt

SEQ ID NO: 35796 - DNA, 16 bp, Artificial
  oligonucleotide probe
gtccgggtcaggcagg

SEQ ID NO: 35797 - DNA, 16 bp, Artificial
  oligonucleotide probe
acgcagcggggtgacg

SEQ ID NO: 35798 - DNA, 16 bp, Artificial
  oligonucleotide probe
gtggcgagcctcgggt

SEQ ID NO: 35799 - DNA, 16 bp, Artificial
  oligonucleotide probe
cctcgtggcggacgga

SEQ ID NO: 35800 - DNA, 16 bp, Artificial
  oligonucleotide probe
caggcctccctcgcga

SEQ ID NO: 35801 - DNA, 16 bp, Artificial
  oligonucleotide probe
cggagcaggagcggaa

SEQ ID NO: 35802 - DNA, 16 bp, Artificial
  oligonucleotide probe
gtccgggtcaggcagg

SEQ ID NO: 35803 - DNA, 16 bp, Artificial
  oligonucleotide probe
acgcagcggggtgacg

SEQ ID NO: 35804 - DNA, 16 bp, Artificial
  oligonucleotide probe
cggagcctgagcgtgg

SEQ ID NO: 35805 - DNA, 16 bp, Artificial
  oligonucleotide probe
actgcggacgaggcct

SEQ ID NO: 35806 - DNA, 16 bp, Artificial
  oligonucleotide probe
caggcctccctcgcga

SEQ ID NO: 35807 - DNA, 16 bp, Artificial
  oligonucleotide probe
cggagcaggagcggaa

SEQ ID NO: 35808 - DNA, 16 bp, Artificial
  oligonucleotide probe
agcggcgagagcgtcc

SEQ ID NO: 35809 - DNA, 16 bp, Artificial
  oligonucleotide probe
tggcaccagcaggggt

SEQ ID NO: 35810 - DNA, 16 bp, Artificial
  oligonucleotide probe
gtggcgagcctcgggt

SEQ ID NO: 35811 - DNA, 16 bp, Artificial
  oligonucleotide probe
cctcgtggcggacgga

SEQ ID NO: 35812 - DNA, 16 bp, Artificial
  oligonucleotide probe
tgctcggatgctgcga

SEQ ID NO: 35813 - DNA, 16 bp, Artificial
  oligonucleotide probe
gagcgagcagcgggtc

SEQ ID NO: 35814 - DNA, 16 bp, Artificial
  oligonucleotide probe
tgctcggatgctgcga

SEQ ID NO: 35815 - DNA, 16 bp, Artificial
  oligonucleotide probe
gagcgagcagcgggtc

SEQ ID NO: 35816 - DNA, 16 bp, Artificial
  oligonucleotide probe
caggcctccctcgcga

SEQ ID NO: 35817 - DNA, 16 bp, Artificial
  oligonucleotide probe
cggagcaggagcggaa

SEQ ID NO: 35818 - DNA, 16 bp, Artificial
  oligonucleotide probe
agcgcaccgacgacgc

SEQ ID NO: 35819 - DNA, 16 bp, Artificial
  oligonucleotide probe
acgcccaacagggagc

SEQ ID NO: 35820 - DNA, 16 bp, Artificial
  oligonucleotide probe
cggagcctgagcgtgg

SEQ ID NO: 35821 - DNA, 16 bp, Artificial
  oligonucleotide probe
actgcggacgaggcct

SEQ ID NO: 35822 - DNA, 16 bp, Artificial
  oligonucleotide probe
agcggcgagagcgtcc

SEQ ID NO: 35823 - DNA, 16 bp, Artificial
  oligonucleotide probe
tggcaccagcaggggt

SEQ ID NO: 35824 - DNA, 16 bp, Artificial
  oligonucleotide probe
gtccgggtcaggcagg

SEQ ID NO: 35825 - DNA, 16 bp, Artificial
  oligonucleotide probe
acgcagcggggtgacg

SEQ ID NO: 35826 - DNA, 16 bp, Artificial
  oligonucleotide probe
agcggcgagagcgtcc

SEQ ID NO: 35827 - DNA, 16 bp, Artificial
  oligonucleotide probe
tggcaccagcaggggt

SEQ ID NO: 35828 - DNA, 16 bp, Artificial
  oligonucleotide probe
tgctcggatgctgcga

SEQ ID NO: 35829 - DNA, 16 bp, Artificial
  oligonucleotide probe
gagcgagcagcgggtc

SEQ ID NO: 35830 - DNA, 16 bp, Artificial
  oligonucleotide probe
cgagcaccgagccgga

SEQ ID NO: 35831 - DNA, 16 bp, Artificial
  oligonucleotide probe
gcgacagggcctgcct

SEQ ID NO: 35832 - DNA, 16 bp, Artificial
  oligonucleotide probe
cgagcaccgagccgga

SEQ ID NO: 35833 - DNA, 16 bp, Artificial
  oligonucleotide probe
gcgacagggcctgcct

SEQ ID NO: 35834 - DNA, 16 bp, Artificial
  oligonucleotide probe
agcgcaccgacgacgc

SEQ ID NO: 35835 - DNA, 16 bp, Artificial
  oligonucleotide probe
acgcccaacagggagc

SEQ ID NO: 35836 - DNA, 16 bp, Artificial
  oligonucleotide probe
agcgcaccgacgacgc

SEQ ID NO: 35837 - DNA, 16 bp, Artificial
  oligonucleotide probe
acgcccaacagggagc

SEQ ID NO: 35838 - DNA, 16 bp, Artificial
  oligonucleotide probe
cggagcctgagcgtgg

SEQ ID NO: 35839 - DNA, 16 bp, Artificial
  oligonucleotide probe
actgcggacgaggcct

SEQ ID NO: 35840 - DNA, 16 bp, Artificial
  oligonucleotide probe
tgctcggatgctgcga

SEQ ID NO: 35841 - DNA, 16 bp, Artificial
  oligonucleotide probe
gagcgagcagcgggtc

SEQ ID NO: 35842 - DNA, 16 bp, Artificial
  oligonucleotide probe
tgctcggatgctgcga

SEQ ID NO: 35843 - DNA, 16 bp, Artificial
  oligonucleotide probe
gagcgagcagcgggtc

SEQ ID NO: 35844 - DNA, 16 bp, Artificial
  oligonucleotide probe
gtggcgagcctcgggt

SEQ ID NO: 35845 - DNA, 16 bp, Artificial
  oligonucleotide probe
cctcgtggcggacgga

SEQ ID NO: 35846 - DNA, 16 bp, Artificial
  oligonucleotide probe
agcggcgagagcgtcc

SEQ ID NO: 35847 - DNA, 16 bp, Artificial
  oligonucleotide probe
tggcaccagcaggggt

SEQ ID NO: 35848 - DNA, 16 bp, Artificial
  oligonucleotide probe
cgagcaccgagccgga

SEQ ID NO: 35849 - DNA, 16 bp, Artificial
  oligonucleotide probe
gcgacagggcctgcct

SEQ ID NO: 35850 - DNA, 16 bp, Artificial
  oligonucleotide probe
gtggcgagcctcgggt

SEQ ID NO: 35851 - DNA, 16 bp, Artificial
  oligonucleotide probe
cctcgtggcggacgga

SEQ ID NO: 35852 - DNA, 16 bp, Artificial
  oligonucleotide probe
gtggcgagcctcgggt

SEQ ID NO: 35853 - DNA, 16 bp, Artificial
  oligonucleotide probe
cctcgtggcggacgga

SEQ ID NO: 35854 - DNA, 16 bp, Artificial
  oligonucleotide probe
cagggcagggtcgggt

SEQ ID NO: 35855 - DNA, 16 bp, Artificial
  oligonucleotide probe
ggtcgcgacacctggc

SEQ ID NO: 35856 - DNA, 16 bp, Artificial
  oligonucleotide probe
gcctcaggacgcacgc

SEQ ID NO: 35857 - DNA, 16 bp, Artificial
  oligonucleotide probe
gcgacctcacgcgcag

SEQ ID NO: 35858 - DNA, 16 bp, Artificial
  oligonucleotide probe
gtccgggtcaggcagg

SEQ ID NO: 35859 - DNA, 16 bp, Artificial
  oligonucleotide probe
acgcagcggggtgacg

SEQ ID NO: 35860 - DNA, 16 bp, Artificial
  oligonucleotide probe
gtccgggtcaggcagg

SEQ ID NO: 35861 - DNA, 16 bp, Artificial
  oligonucleotide probe
acgcagcggggtgacg

SEQ ID NO: 35862 - DNA, 16 bp, Artificial
  oligonucleotide probe
gtgggggtgcagggaa

SEQ ID NO: 35863 - DNA, 16 bp, Artificial
  oligonucleotide probe
cacccgagagcggtgg

SEQ ID NO: 35864 - DNA, 16 bp, Artificial
  oligonucleotide probe
cgagcaccgagccgga

SEQ ID NO: 35865 - DNA, 16 bp, Artificial
  oligonucleotide probe
gcgacagggcctgcct

SEQ ID NO: 35866 - DNA, 16 bp, Artificial
  oligonucleotide probe
agcggcgagagcgtcc

SEQ ID NO: 35867 - DNA, 16 bp, Artificial
  oligonucleotide probe
tggcaccagcaggggt

SEQ ID NO: 35868 - DNA, 16 bp, Artificial
  oligonucleotide probe
cctcgtggcggacgga

SEQ ID NO: 35869 - DNA, 16 bp, Artificial
  oligonucleotide probe
gcgacagggcctgcct

SEQ ID NO: 35870 - DNA, 16 bp, Artificial
  oligonucleotide probe
gtgggggtgcagggaa

SEQ ID NO: 35871 - DNA, 16 bp, Artificial
  oligonucleotide probe
cacccgagagcggtgg

SEQ ID NO: 35872 - DNA, 16 bp, Artificial
  oligonucleotide probe
agcggcgagagcgtcc

SEQ ID NO: 35873 - DNA, 16 bp, Artificial
  oligonucleotide probe
tggcaccagcaggggt

SEQ ID NO: 35874 - DNA, 16 bp, Artificial
  oligonucleotide probe
caggcctccctcgcga

SEQ ID NO: 35875 - DNA, 16 bp, Artificial
  oligonucleotide probe
cggagcaggagcggaa

SEQ ID NO: 35876 - DNA, 16 bp, Artificial
  oligonucleotide probe
gtgggggtgcagggaa

SEQ ID NO: 35877 - DNA, 16 bp, Artificial
  oligonucleotide probe
cacccgagagcggtgg

SEQ ID NO: 35878 - DNA, 16 bp, Artificial
  oligonucleotide probe
gtccgggtcaggcagg

SEQ ID NO: 35879 - DNA, 16 bp, Artificial
  oligonucleotide probe
acgcagcggggtgacg

SEQ ID NO: 35880 - DNA, 16 bp, Artificial
  oligonucleotide probe
tgctcggatgctgcga

SEQ ID NO: 35881 - DNA, 16 bp, Artificial
  oligonucleotide probe
gagcgagcagcgggtc

SEQ ID NO: 35882 - DNA, 16 bp, Artificial
  oligonucleotide probe
gtggcgagcctcgggt

SEQ ID NO: 35883 - DNA, 16 bp, Artificial
  oligonucleotide probe
cctcgtggcggacgga

SEQ ID NO: 35884 - DNA, 16 bp, Artificial
  oligonucleotide probe
cgagcaccgagccgga

SEQ ID NO: 35885 - DNA, 16 bp, Artificial
  oligonucleotide probe
gcgacagggcctgcct

SEQ ID NO: 35886 - DNA, 16 bp, Artificial
  oligonucleotide probe
gtccgggtcaggcagg

SEQ ID NO: 35887 - DNA, 16 bp, Artificial
  oligonucleotide probe
acgcagcggggtgacg

SEQ ID NO: 35888 - DNA, 16 bp, Artificial
  oligonucleotide probe
gcctcaggacgcacgc

SEQ ID NO: 35889 - DNA, 16 bp, Artificial
  oligonucleotide probe
gcgacctcacgcgcag

SEQ ID NO: 35890 - DNA, 16 bp, Artificial
  oligonucleotide probe
cgagcaccgagccgga

SEQ ID NO: 35891 - DNA, 16 bp, Artificial
  oligonucleotide probe
gcgacagggcctgcct

SEQ ID NO: 35892 - DNA, 16 bp, Artificial
  oligonucleotide probe
gtgggggtgcagggaa

SEQ ID NO: 35893 - DNA, 16 bp, Artificial
  oligonucleotide probe
cacccgagagcggtgg

SEQ ID NO: 35894 - DNA, 16 bp, Artificial
  oligonucleotide probe
cctcgtggcggacgga

SEQ ID NO: 35895 - DNA, 16 bp, Artificial
  oligonucleotide probe
gcgacagggcctgcct

SEQ ID NO: 35896 - DNA, 16 bp, Artificial
  oligonucleotide probe
gcctcaggacgcacgc

SEQ ID NO: 35897 - DNA, 16 bp, Artificial
  oligonucleotide probe
gcgacctcacgcgcag

SEQ ID NO: 35898 - DNA, 16 bp, Artificial
  oligonucleotide probe
agcgcaccgacgacgc

SEQ ID NO: 35899 - DNA, 16 bp, Artificial
  oligonucleotide probe
acgcccaacagggagc

SEQ ID NO: 35900 - DNA, 16 bp, Artificial
  oligonucleotide probe
gtgggggtgcagggaa

SEQ ID NO: 35901 - DNA, 16 bp, Artificial
  oligonucleotide probe
cacccgagagcggtgg

SEQ ID NO: 35902 - DNA, 16 bp, Artificial
  oligonucleotide probe
caggcctccctcgcga

SEQ ID NO: 35903 - DNA, 16 bp, Artificial
  oligonucleotide probe
cggagcaggagcggaa

SEQ ID NO: 35904 - DNA, 16 bp, Artificial
  oligonucleotide probe
gtggcgagcctcgggt

SEQ ID NO: 35905 - DNA, 16 bp, Artificial
  oligonucleotide probe
cctcgtggcggacgga

SEQ ID NO: 35906 - DNA, 16 bp, Artificial
  oligonucleotide probe
agcggcgagagcgtcc

SEQ ID NO: 35907 - DNA, 16 bp, Artificial
  oligonucleotide probe
tggcaccagcaggggt

SEQ ID NO: 35908 - DNA, 16 bp, Artificial
  oligonucleotide probe
gcctcaggacgcacgc

SEQ ID NO: 35909 - DNA, 16 bp, Artificial
  oligonucleotide probe
gcgacctcacgcgcag

SEQ ID NO: 35910 - DNA, 16 bp, Artificial
  oligonucleotide probe
cagggcagggtcgggt

SEQ ID NO: 35911 - DNA, 16 bp, Artificial
  oligonucleotide probe
ggtcgcgacacctggc

SEQ ID NO: 35912 - DNA, 16 bp, Artificial
  oligonucleotide probe
gtccgggtcaggcagg

SEQ ID NO: 35913 - DNA, 16 bp, Artificial
  oligonucleotide probe
acgcagcggggtgacg

SEQ ID NO: 35914 - DNA, 16 bp, Artificial
  oligonucleotide probe
cggagcctgagcgtgg

SEQ ID NO: 35915 - DNA, 16 bp, Artificial
  oligonucleotide probe
actgcggacgaggcct

SEQ ID NO: 35916 - DNA, 16 bp, Artificial
  oligonucleotide probe
agcggcgagagcgtcc

SEQ ID NO: 35917 - DNA, 16 bp, Artificial
  oligonucleotide probe
tggcaccagcaggggt

SEQ ID NO: 35918 - DNA, 16 bp, Artificial
  oligonucleotide probe
gagcgagcagcgggtc

SEQ ID NO: 35919 - DNA, 16 bp, Artificial
  oligonucleotide probe
cacccgagagcggtgg

SEQ ID NO: 35920 - DNA, 16 bp, Artificial
  oligonucleotide probe
cggagcctgagcgtgg

SEQ ID NO: 35921 - DNA, 16 bp, Artificial
  oligonucleotide probe
actgcggacgaggcct

SEQ ID NO: 35922 - DNA, 16 bp, Artificial
  oligonucleotide probe
agcggcgagagcgtcc

SEQ ID NO: 35923 - DNA, 16 bp, Artificial
  oligonucleotide probe
tggcaccagcaggggt

SEQ ID NO: 35924 - DNA, 16 bp, Artificial
  oligonucleotide probe
cgagcaccgagccgga

SEQ ID NO: 35925 - DNA, 16 bp, Artificial
  oligonucleotide probe
gcgacagggcctgcct

SEQ ID NO: 35926 - DNA, 16 bp, Artificial
  oligonucleotide probe
gtggcgagcctcgggt

SEQ ID NO: 35927 - DNA, 16 bp, Artificial
  oligonucleotide probe
cctcgtggcggacgga

SEQ ID NO: 35928 - DNA, 16 bp, Artificial
  oligonucleotide probe
gtgggggtgcagggaa

SEQ ID NO: 35929 - DNA, 16 bp, Artificial
  oligonucleotide probe
cacccgagagcggtgg

SEQ ID NO: 35930 - DNA, 16 bp, Artificial
  oligonucleotide probe
gcctcaggacgcacgc

SEQ ID NO: 35931 - DNA, 16 bp, Artificial
  oligonucleotide probe
gcgacctcacgcgcag

SEQ ID NO: 35932 - DNA, 16 bp, Artificial
  oligonucleotide probe
caggcctccctcgcga

SEQ ID NO: 35933 - DNA, 16 bp, Artificial
  oligonucleotide probe
cggagcaggagcggaa

SEQ ID NO: 35934 - DNA, 16 bp, Artificial
  oligonucleotide probe
agcgcaccgacgacgc

SEQ ID NO: 35935 - DNA, 16 bp, Artificial
  oligonucleotide probe
acgcccaacagggagc

SEQ ID NO: 35936 - DNA, 16 bp, Artificial
  oligonucleotide probe
cgagcaccgagccgga

SEQ ID NO: 35937 - DNA, 16 bp, Artificial
  oligonucleotide probe
gcgacagggcctgcct

SEQ ID NO: 35938 - DNA, 16 bp, Artificial
  oligonucleotide probe
tgctcggatgctgcga

SEQ ID NO: 35939 - DNA, 16 bp, Artificial
  oligonucleotide probe
gagcgagcagcgggtc

SEQ ID NO: 35940 - DNA, 16 bp, Artificial
  oligonucleotide probe
cgagcaccgagccgga

SEQ ID NO: 35941 - DNA, 16 bp, Artificial
  oligonucleotide probe
gcgacagggcctgcct

SEQ ID NO: 35942 - DNA, 16 bp, Artificial
  oligonucleotide probe
cgagcaccgagccgga

SEQ ID NO: 35943 - DNA, 16 bp, Artificial
  oligonucleotide probe
gcgacagggcctgcct

SEQ ID NO: 35944 - DNA, 16 bp, Artificial
  oligonucleotide probe
caggcctccctcgcga

SEQ ID NO: 35945 - DNA, 16 bp, Artificial
  oligonucleotide probe
cggagcaggagcggaa

SEQ ID NO: 35946 - DNA, 16 bp, Artificial
  oligonucleotide probe
cggagcctgagcgtgg

SEQ ID NO: 35947 - DNA, 16 bp, Artificial
  oligonucleotide probe
actgcggacgaggcct

SEQ ID NO: 35948 - DNA, 16 bp, Artificial
  oligonucleotide probe
agcgcaccgacgacgc

SEQ ID NO: 35949 - DNA, 16 bp, Artificial
  oligonucleotide probe
acgcccaacagggagc

SEQ ID NO: 35950 - DNA, 16 bp, Artificial
  oligonucleotide probe
gtgggggtgcagggaa

SEQ ID NO: 35951 - DNA, 16 bp, Artificial
  oligonucleotide probe
cacccgagagcggtgg

SEQ ID NO: 35952 - DNA, 16 bp, Artificial
  oligonucleotide probe
agcggcgagagcgtcc

SEQ ID NO: 35953 - DNA, 16 bp, Artificial
  oligonucleotide probe
tggcaccagcaggggt

SEQ ID NO: 35954 - DNA, 16 bp, Artificial
  oligonucleotide probe
gtggcgagcctcgggt

SEQ ID NO: 35955 - DNA, 16 bp, Artificial
  oligonucleotide probe
cctcgtggcggacgga

SEQ ID NO: 35956 - DNA, 16 bp, Artificial
  oligonucleotide probe
cctcgtggcggacgga

SEQ ID NO: 35957 - DNA, 16 bp, Artificial
  oligonucleotide probe
gcgacagggcctgcct

SEQ ID NO: 35958 - DNA, 16 bp, Artificial
  oligonucleotide probe
gagcgagcagcgggtc

SEQ ID NO: 35959 - DNA, 16 bp, Artificial
  oligonucleotide probe
cacccgagagcggtgg

SEQ ID NO: 35960 - DNA, 16 bp, Artificial
  oligonucleotide probe
agcgcaccgacgacgc

SEQ ID NO: 35961 - DNA, 16 bp, Artificial
  oligonucleotide probe
acgcccaacagggagc

SEQ ID NO: 35962 - DNA, 16 bp, Artificial
  oligonucleotide probe
agcgcaccgacgacgc

SEQ ID NO: 35963 - DNA, 16 bp, Artificial
  oligonucleotide probe
acgcccaacagggagc

SEQ ID NO: 35964 - DNA, 16 bp, Artificial
  oligonucleotide probe
gggtacgcgacgcgag

SEQ ID NO: 35965 - DNA, 16 bp, Artificial
  oligonucleotide probe
gagcgacgcgagagcg

SEQ ID NO: 35966 - DNA, 16 bp, Artificial
  oligonucleotide probe
tgctcggatgctgcga

SEQ ID NO: 35967 - DNA, 16 bp, Artificial
  oligonucleotide probe
gagcgagcagcgggtc

SEQ ID NO: 35968 - DNA, 16 bp, Artificial
  oligonucleotide probe
cagggcagggtcgggt

SEQ ID NO: 35969 - DNA, 16 bp, Artificial
  oligonucleotide probe
ggtcgcgacacctggc

SEQ ID NO: 35970 - DNA, 16 bp, Artificial
  oligonucleotide probe
tgctcggatgctgcga

SEQ ID NO: 35971 - DNA, 16 bp, Artificial
  oligonucleotide probe
gagcgagcagcgggtc

SEQ ID NO: 35972 - DNA, 16 bp, Artificial
  oligonucleotide probe
gagcgagcagcgggtc

SEQ ID NO: 35973 - DNA, 16 bp, Artificial
  oligonucleotide probe
cacccgagagcggtgg

SEQ ID NO: 35974 - DNA, 16 bp, Artificial
  oligonucleotide probe
cagggcagggtcgggt

SEQ ID NO: 35975 - DNA, 16 bp, Artificial
  oligonucleotide probe
ggtcgcgacacctggc

SEQ ID NO: 35976 - DNA, 16 bp, Artificial
  oligonucleotide probe
gtggcgagcctcgggt

SEQ ID NO: 35977 - DNA, 16 bp, Artificial
  oligonucleotide probe
cctcgtggcggacgga

SEQ ID NO: 35978 - DNA, 16 bp, Artificial
  oligonucleotide probe
gtgggggtgcagggaa

SEQ ID NO: 35979 - DNA, 16 bp, Artificial
  oligonucleotide probe
cacccgagagcggtgg

SEQ ID NO: 35980 - DNA, 16 bp, Artificial
  oligonucleotide probe
gcctcaggacgcacgc

SEQ ID NO: 35981 - DNA, 16 bp, Artificial
  oligonucleotide probe
gcgacctcacgcgcag

SEQ ID NO: 35982 - DNA, 16 bp, Artificial
  oligonucleotide probe
caggcctccctcgcga

SEQ ID NO: 35983 - DNA, 16 bp, Artificial
  oligonucleotide probe
cggagcaggagcggaa

SEQ ID NO: 35984 - DNA, 16 bp, Artificial
  oligonucleotide probe
cgagcaccgagccgga

SEQ ID NO: 35985 - DNA, 16 bp, Artificial
  oligonucleotide probe
gcgacagggcctgcct

SEQ ID NO: 35986 - DNA, 16 bp, Artificial
  oligonucleotide probe
cgagcaccgagccgga

SEQ ID NO: 35987 - DNA, 16 bp, Artificial
  oligonucleotide probe
gcgacagggcctgcct

SEQ ID NO: 35988 - DNA, 16 bp, Artificial
  oligonucleotide probe
gtgggggtgcagggaa

SEQ ID NO: 35989 - DNA, 16 bp, Artificial
  oligonucleotide probe
cacccgagagcggtgg

SEQ ID NO: 35990 - DNA, 16 bp, Artificial
  oligonucleotide probe
agcggcgagagcgtcc

SEQ ID NO: 35991 - DNA, 16 bp, Artificial
  oligonucleotide probe
tggcaccagcaggggt

SEQ ID NO: 35992 - DNA, 16 bp, Artificial
  oligonucleotide probe
agcgcaccgacgacgc

SEQ ID NO: 35993 - DNA, 16 bp, Artificial
  oligonucleotide probe
acgcccaacagggagc

SEQ ID NO: 35994 - DNA, 16 bp, Artificial
  oligonucleotide probe
gtggcgagcctcgggt

SEQ ID NO: 35995 - DNA, 16 bp, Artificial
  oligonucleotide probe
cctcgtggcggacgga

SEQ ID NO: 35996 - DNA, 16 bp, Artificial
  oligonucleotide probe
agcgcaccgacgacgc

SEQ ID NO: 35997 - DNA, 16 bp, Artificial
  oligonucleotide probe
acgcccaacagggagc

SEQ ID NO: 35998 - DNA, 16 bp, Artificial
  oligonucleotide probe
agcggcgagagcgtcc

SEQ ID NO: 35999 - DNA, 16 bp, Artificial
  oligonucleotide probe
tggcaccagcaggggt

SEQ ID NO: 36000 - DNA, 16 bp, Artificial
  oligonucleotide probe
agcgcaccgacgacgc

SEQ ID NO: 36001 - DNA, 16 bp, Artificial
  oligonucleotide probe
acgcccaacagggagc

SEQ ID NO: 36002 - DNA, 16 bp, Artificial
  oligonucleotide probe
gtgggggtgcagggaa

SEQ ID NO: 36003 - DNA, 16 bp, Artificial
  oligonucleotide probe
cacccgagagcggtgg

SEQ ID NO: 36004 - DNA, 16 bp, Artificial
  oligonucleotide probe
tgctcggatgctgcga

SEQ ID NO: 36005 - DNA, 16 bp, Artificial
  oligonucleotide probe
gagcgagcagcgggtc

SEQ ID NO: 36006 - DNA, 16 bp, Artificial
  oligonucleotide probe
agcggcgagagcgtcc

SEQ ID NO: 36007 - DNA, 16 bp, Artificial
  oligonucleotide probe
tggcaccagcaggggt

SEQ ID NO: 36008 - DNA, 16 bp, Artificial
  oligonucleotide probe
tgctcggatgctgcga

SEQ ID NO: 36009 - DNA, 16 bp, Artificial
  oligonucleotide probe
gagcgagcagcgggtc

SEQ ID NO: 36010 - DNA, 16 bp, Artificial
  oligonucleotide probe
gtggcgagcctcgggt

SEQ ID NO: 36011 - DNA, 16 bp, Artificial
  oligonucleotide probe
cctcgtggcggacgga

SEQ ID NO: 36012 - DNA, 16 bp, Artificial
  oligonucleotide probe
agcgcaccgacgacgc

SEQ ID NO: 36013 - DNA, 16 bp, Artificial
  oligonucleotide probe
acgcccaacagggagc

SEQ ID NO: 36014 - DNA, 16 bp, Artificial
  oligonucleotide probe
gtgggggtgcagggaa

SEQ ID NO: 36015 - DNA, 16 bp, Artificial
  oligonucleotide probe
cacccgagagcggtgg

SEQ ID NO: 36016 - DNA, 16 bp, Artificial
  oligonucleotide probe
cgagcaccgagccgga

SEQ ID NO: 36017 - DNA, 16 bp, Artificial
  oligonucleotide probe
gcgacagggcctgcct

SEQ ID NO: 36018 - DNA, 16 bp, Artificial
  oligonucleotide probe
gcctcaggacgcacgc

SEQ ID NO: 36019 - DNA, 16 bp, Artificial
  oligonucleotide probe
gcgacctcacgcgcag

SEQ ID NO: 36020 - DNA, 16 bp, Artificial
  oligonucleotide probe
cgagcaccgagccgga

SEQ ID NO: 36021 - DNA, 16 bp, Artificial
  oligonucleotide probe
gcgacagggcctgcct

SEQ ID NO: 36022 - DNA, 16 bp, Artificial
  oligonucleotide probe
gtgggggtgcagggaa

SEQ ID NO: 36023 - DNA, 16 bp, Artificial
  oligonucleotide probe
cacccgagagcggtgg

SEQ ID NO: 36024 - DNA, 16 bp, Artificial
  oligonucleotide probe
gcctcaggacgcacgc

SEQ ID NO: 36025 - DNA, 16 bp, Artificial
  oligonucleotide probe
gcgacctcacgcgcag

SEQ ID NO: 36026 - DNA, 16 bp, Artificial
  oligonucleotide probe
gtggcgagcctcgggt

SEQ ID NO: 36027 - DNA, 16 bp, Artificial
  oligonucleotide probe
cctcgtggcggacgga

SEQ ID NO: 36028 - DNA, 16 bp, Artificial
  oligonucleotide probe
cggagcctgagcgtgg

SEQ ID NO: 36029 - DNA, 16 bp, Artificial
  oligonucleotide probe
actgcggacgaggcct

SEQ ID NO: 36030 - DNA, 16 bp, Artificial
  oligonucleotide probe
agcggcgagagcgtcc

SEQ ID NO: 36031 - DNA, 16 bp, Artificial
  oligonucleotide probe
tggcaccagcaggggt

SEQ ID NO: 36032 - DNA, 16 bp, Artificial
  oligonucleotide probe
gtggcgagcctcgggt

SEQ ID NO: 36033 - DNA, 16 bp, Artificial
  oligonucleotide probe
cctcgtggcggacgga

SEQ ID NO: 36034 - DNA, 16 bp, Artificial
  oligonucleotide probe
gtggcgagcctcgggt

SEQ ID NO: 36035 - DNA, 16 bp, Artificial
  oligonucleotide probe
cctcgtggcggacgga

SEQ ID NO: 36036 - DNA, 16 bp, Artificial
  oligonucleotide probe
cgagcaccgagccgga

SEQ ID NO: 36037 - DNA, 16 bp, Artificial
  oligonucleotide probe
gcgacagggcctgcct

SEQ ID NO: 36038 - DNA, 16 bp, Artificial
  oligonucleotide probe
cagggcagggtcgggt

SEQ ID NO: 36039 - DNA, 16 bp, Artificial
  oligonucleotide probe
ggtcgcgacacctggc

SEQ ID NO: 36040 - DNA, 16 bp, Artificial
  oligonucleotide probe
agcggcgagagcgtcc

SEQ ID NO: 36041 - DNA, 16 bp, Artificial
  oligonucleotide probe
tggcaccagcaggggt

SEQ ID NO: 36042 - DNA, 16 bp, Artificial
  oligonucleotide probe
gtgggggtgcagggaa

SEQ ID NO: 36043 - DNA, 16 bp, Artificial
  oligonucleotide probe
cacccgagagcggtgg

SEQ ID NO: 36044 - DNA, 16 bp, Artificial
  oligonucleotide probe
agcggcgagagcgtcc

SEQ ID NO: 36045 - DNA, 16 bp, Artificial
  oligonucleotide probe
tggcaccagcaggggt

SEQ ID NO: 36046 - DNA, 16 bp, Artificial
  oligonucleotide probe
tgctcggatgctgcga

SEQ ID NO: 36047 - DNA, 16 bp, Artificial
  oligonucleotide probe
gagcgagcagcgggtc

SEQ ID NO: 36048 - DNA, 16 bp, Artificial
  oligonucleotide probe
agcggcgagagcgtcc

SEQ ID NO: 36049 - DNA, 16 bp, Artificial
  oligonucleotide probe
tggcaccagcaggggt

SEQ ID NO: 36050 - DNA, 16 bp, Artificial
  oligonucleotide probe
agcgcaccgacgacgc

SEQ ID NO: 36051 - DNA, 16 bp, Artificial
  oligonucleotide probe
acgcccaacagggagc

SEQ ID NO: 36052 - DNA, 16 bp, Artificial
  oligonucleotide probe
agcgcaccgacgacgc

SEQ ID NO: 36053 - DNA, 16 bp, Artificial
  oligonucleotide probe
acgcccaacagggagc

SEQ ID NO: 36054 - DNA, 16 bp, Artificial
  oligonucleotide probe
cgagcaccgagccgga

SEQ ID NO: 36055 - DNA, 16 bp, Artificial
  oligonucleotide probe
gcgacagggcctgcct

SEQ ID NO: 36056 - DNA, 16 bp, Artificial
  oligonucleotide probe
cgagcaccgagccgga

SEQ ID NO: 36057 - DNA, 16 bp, Artificial
  oligonucleotide probe
gcgacagggcctgcct

SEQ ID NO: 36058 - DNA, 16 bp, Artificial
  oligonucleotide probe
gtgggggtgcagggaa

SEQ ID NO: 36059 - DNA, 16 bp, Artificial
  oligonucleotide probe
cacccgagagcggtgg

SEQ ID NO: 36060 - DNA, 16 bp, Artificial
  oligonucleotide probe
cgagcaccgagccgga

SEQ ID NO: 36061 - DNA, 16 bp, Artificial
  oligonucleotide probe
gcgacagggcctgcct

SEQ ID NO: 36062 - DNA, 16 bp, Artificial
  oligonucleotide probe
agcggcgagagcgtcc

SEQ ID NO: 36063 - DNA, 16 bp, Artificial
  oligonucleotide probe
tggcaccagcaggggt

SEQ ID NO: 36064 - DNA, 16 bp, Artificial
  oligonucleotide probe
gtggcgagcctcgggt

SEQ ID NO: 36065 - DNA, 16 bp, Artificial
  oligonucleotide probe
cctcgtggcggacgga

SEQ ID NO: 36066 - DNA, 16 bp, Artificial
  oligonucleotide probe
tgctcggatgctgcga

SEQ ID NO: 36067 - DNA, 16 bp, Artificial
  oligonucleotide probe
gagcgagcagcgggtc

SEQ ID NO: 36068 - DNA, 16 bp, Artificial
  oligonucleotide probe
gtgggggtgcagggaa

SEQ ID NO: 36069 - DNA, 16 bp, Artificial
  oligonucleotide probe
cacccgagagcggtgg

SEQ ID NO: 36070 - DNA, 16 bp, Artificial
  oligonucleotide probe
agcgcaccgacgacgc

SEQ ID NO: 36071 - DNA, 16 bp, Artificial
  oligonucleotide probe
acgcccaacagggagc

SEQ ID NO: 36072 - DNA, 16 bp, Artificial
  oligonucleotide probe
agcggcgagagcgtcc

SEQ ID NO: 36073 - DNA, 16 bp, Artificial
  oligonucleotide probe
tggcaccagcaggggt

SEQ ID NO: 36074 - DNA, 16 bp, Artificial
  oligonucleotide probe
gcctcaggacgcacgc

SEQ ID NO: 36075 - DNA, 16 bp, Artificial
  oligonucleotide probe
gcgacctcacgcgcag

SEQ ID NO: 36076 - DNA, 16 bp, Artificial
  oligonucleotide probe
cgagcaccgagccgga

SEQ ID NO: 36077 - DNA, 16 bp, Artificial
  oligonucleotide probe
gcgacagggcctgcct

SEQ ID NO: 36078 - DNA, 16 bp, Artificial
  oligonucleotide probe
cgagcaccgagccgga

SEQ ID NO: 36079 - DNA, 16 bp, Artificial
  oligonucleotide probe
gcgacagggcctgcct

SEQ ID NO: 36080 - DNA, 16 bp, Artificial
  oligonucleotide probe
agcggcgagagcgtcc

SEQ ID NO: 36081 - DNA, 16 bp, Artificial
  oligonucleotide probe
tggcaccagcaggggt

SEQ ID NO: 36082 - DNA, 16 bp, Artificial
  oligonucleotide probe
gtccgggtcaggcagg

SEQ ID NO: 36083 - DNA, 16 bp, Artificial
  oligonucleotide probe
acgcagcggggtgacg

SEQ ID NO: 36084 - DNA, 16 bp, Artificial
  oligonucleotide probe
cggagcctgagcgtgg

SEQ ID NO: 36085 - DNA, 16 bp, Artificial
  oligonucleotide probe
actgcggacgaggcct

SEQ ID NO: 36086 - DNA, 16 bp, Artificial
  oligonucleotide probe
gtggcgagcctcgggt

SEQ ID NO: 36087 - DNA, 16 bp, Artificial
  oligonucleotide probe
cctcgtggcggacgga

SEQ ID NO: 36088 - DNA, 16 bp, Artificial
  oligonucleotide probe
agcggcgagagcgtcc

SEQ ID NO: 36089 - DNA, 16 bp, Artificial
  oligonucleotide probe
tggcaccagcaggggt

SEQ ID NO: 36090 - DNA, 16 bp, Artificial
  oligonucleotide probe
cgagcaccgagccgga

SEQ ID NO: 36091 - DNA, 16 bp, Artificial
  oligonucleotide probe
gcgacagggcctgcct

SEQ ID NO: 36092 - DNA, 16 bp, Artificial
  oligonucleotide probe
gtccgggtcaggcagg

SEQ ID NO: 36093 - DNA, 16 bp, Artificial
  oligonucleotide probe
acgcagcggggtgacg

SEQ ID NO: 36094 - DNA, 16 bp, Artificial
  oligonucleotide probe
tgctcggatgctgcga

SEQ ID NO: 36095 - DNA, 16 bp, Artificial
  oligonucleotide probe
gagcgagcagcgggtc

SEQ ID NO: 36096 - DNA, 16 bp, Artificial
  oligonucleotide probe
gtgggggtgcagggaa

SEQ ID NO: 36097 - DNA, 16 bp, Artificial
  oligonucleotide probe
cacccgagagcggtgg

SEQ ID NO: 36098 - DNA, 16 bp, Artificial
  oligonucleotide probe
agcggcgagagcgtcc

SEQ ID NO: 36099 - DNA, 16 bp, Artificial
  oligonucleotide probe
tggcaccagcaggggt

SEQ ID NO: 36100 - DNA, 16 bp, Artificial
  oligonucleotide probe
agcggcgagagcgtcc

SEQ ID NO: 36101 - DNA, 16 bp, Artificial
  oligonucleotide probe
tggcaccagcaggggt

SEQ ID NO: 36102 - DNA, 16 bp, Artificial
  oligonucleotide probe
gcctcaggacgcacgc

SEQ ID NO: 36103 - DNA, 16 bp, Artificial
  oligonucleotide probe
gcgacctcacgcgcag

SEQ ID NO: 36104 - DNA, 16 bp, Artificial
  oligonucleotide probe
agcgcaccgacgacgc

SEQ ID NO: 36105 - DNA, 16 bp, Artificial
  oligonucleotide probe
acgcccaacagggagc

SEQ ID NO: 36106 - DNA, 16 bp, Artificial
  oligonucleotide probe
cgagcaccgagccgga

SEQ ID NO: 36107 - DNA, 16 bp, Artificial
  oligonucleotide probe
gcgacagggcctgcct

SEQ ID NO: 36108 - DNA, 16 bp, Artificial
  oligonucleotide probe
gtgggggtgcagggaa

SEQ ID NO: 36109 - DNA, 16 bp, Artificial
  oligonucleotide probe
cacccgagagcggtgg

SEQ ID NO: 36110 - DNA, 16 bp, Artificial
  oligonucleotide probe
agcggcgagagcgtcc

SEQ ID NO: 36111 - DNA, 16 bp, Artificial
  oligonucleotide probe
tggcaccagcaggggt

SEQ ID NO: 36112 - DNA, 16 bp, Artificial
  oligonucleotide probe
gtccgggtcaggcagg

SEQ ID NO: 36113 - DNA, 16 bp, Artificial
  oligonucleotide probe
acgcagcggggtgacg

SEQ ID NO: 36114 - DNA, 16 bp, Artificial
  oligonucleotide probe
gcctcaggacgcacgc

SEQ ID NO: 36115 - DNA, 16 bp, Artificial
  oligonucleotide probe
gcgacctcacgcgcag

SEQ ID NO: 36116 - DNA, 16 bp, Artificial
  oligonucleotide probe
gggtacgcgacgcgag

SEQ ID NO: 36117 - DNA, 16 bp, Artificial
  oligonucleotide probe
gagcgacgcgagagcg

SEQ ID NO: 36118 - DNA, 16 bp, Artificial
  oligonucleotide probe
cggagcctgagcgtgg

SEQ ID NO: 36119 - DNA, 16 bp, Artificial
  oligonucleotide probe
actgcggacgaggcct

SEQ ID NO: 36120 - DNA, 16 bp, Artificial
  oligonucleotide probe
caggcctccctcgcga

SEQ ID NO: 36121 - DNA, 16 bp, Artificial
  oligonucleotide probe
cggagcaggagcggaa

SEQ ID NO: 36122 - DNA, 16 bp, Artificial
  oligonucleotide probe
agcggcgagagcgtcc

SEQ ID NO: 36123 - DNA, 16 bp, Artificial
  oligonucleotide probe
tggcaccagcaggggt

SEQ ID NO: 36124 - DNA, 16 bp, Artificial
  oligonucleotide probe
gagcgagcagcgggtc

SEQ ID NO: 36125 - DNA, 16 bp, Artificial
  oligonucleotide probe
cacccgagagcggtgg

SEQ ID NO: 36126 - DNA, 16 bp, Artificial
  oligonucleotide probe
agcgcaccgacgacgc

SEQ ID NO: 36127 - DNA, 16 bp, Artificial
  oligonucleotide probe
acgcccaacagggagc

SEQ ID NO: 36128 - DNA, 16 bp, Artificial
  oligonucleotide probe
agcggcgagagcgtcc

SEQ ID NO: 36129 - DNA, 16 bp, Artificial
  oligonucleotide probe
tggcaccagcaggggt

SEQ ID NO: 36130 - DNA, 16 bp, Artificial
  oligonucleotide probe
gggtagcggcgagacg

SEQ ID NO: 36131 - DNA, 16 bp, Artificial
  oligonucleotide probe
gagcgacgcgagagcg

SEQ ID NO: 36132 - DNA, 16 bp, Artificial
  oligonucleotide probe
ggtcgcgacacctggc

SEQ ID NO: 36133 - DNA, 16 bp, Artificial
  oligonucleotide probe
acgcagcggggtgacg

SEQ ID NO: 36134 - DNA, 16 bp, Artificial
  oligonucleotide probe
ggaacggaagcggagc

SEQ ID NO: 36135 - DNA, 16 bp, Artificial
  oligonucleotide probe
acgcagcggggtgacg

SEQ ID NO: 36136 - DNA, 16 bp, Artificial
  oligonucleotide probe
acgcccaacagggagc

SEQ ID NO: 36137 - DNA, 16 bp, Artificial
  oligonucleotide probe
cctcgtggcggacgga

SEQ ID NO: 36138 - DNA, 16 bp, Artificial
  oligonucleotide probe
gcgacctcacgcgcag

SEQ ID NO: 36139 - DNA, 16 bp, Artificial
  oligonucleotide probe
acgcccaacagggagc

SEQ ID NO: 36140 - DNA, 16 bp, Artificial
  oligonucleotide probe
gagcgacgcgagagcg

SEQ ID NO: 36141 - DNA, 16 bp, Artificial
  oligonucleotide probe
actgcggacgaggcct

SEQ ID NO: 36142 - DNA, 16 bp, Artificial
  oligonucleotide probe
acgcagcggggtgacg

SEQ ID NO: 36143 - DNA, 16 bp, Artificial
  oligonucleotide probe
cggagcaggagcggaa

SEQ ID NO: 36144 - DNA, 16 bp, Artificial
  oligonucleotide probe
gcgacctcacgcgcag

SEQ ID NO: 36145 - DNA, 16 bp, Artificial
  oligonucleotide probe
acgcccaacagggagc

SEQ ID NO: 36146 - DNA, 16 bp, Artificial
  oligonucleotide probe
actgcggacgaggcct

SEQ ID NO: 36147 - DNA, 16 bp, Artificial
  oligonucleotide probe
gcgacctcacgcgcag

SEQ ID NO: 36148 - DNA, 16 bp, Artificial
  oligonucleotide probe
actgcggacgaggcct

SEQ ID NO: 36149 - DNA, 16 bp, Artificial
  oligonucleotide probe
gcgacctcacgcgcag

SEQ ID NO: 36150 - DNA, 16 bp, Artificial
  oligonucleotide probe
gagcgacgcgagagcg

SEQ ID NO: 36151 - DNA, 16 bp, Artificial
  oligonucleotide probe
gcgacctcacgcgcag

SEQ ID NO: 36152 - DNA, 16 bp, Artificial
  oligonucleotide probe
gcgacagggcctgcct

SEQ ID NO: 36153 - DNA, 16 bp, Artificial
  oligonucleotide probe
cacccgagagcggtgg

SEQ ID NO: 36154 - DNA, 16 bp, Artificial
  oligonucleotide probe
tggcaccagcaggggt

SEQ ID NO: 36155 - DNA, 16 bp, Artificial
  oligonucleotide probe
gtccgggtcaggcagg

SEQ ID NO: 36156 - DNA, 16 bp, Artificial
  oligonucleotide probe
caggcctccctcgcga

SEQ ID NO: 36157 - DNA, 16 bp, Artificial
  oligonucleotide probe
cctcgtggcggacgga

SEQ ID NO: 36158 - DNA, 16 bp, Artificial
  oligonucleotide probe
gcgacagggcctgcct

SEQ ID NO: 36159 - DNA, 16 bp, Artificial
  oligonucleotide probe
gggtacgcgacgcgag

SEQ ID NO: 36160 - DNA, 16 bp, Artificial
  oligonucleotide probe
gagcgacgcgagagcg

SEQ ID NO: 36161 - DNA, 16 bp, Artificial
  oligonucleotide probe
gcaggtggtggcgagc

SEQ ID NO: 36162 - DNA, 16 bp, Artificial
  oligonucleotide probe
gacggacgacgcgtgg

SEQ ID NO: 36163 - DNA, 16 bp, Artificial
  oligonucleotide probe
actgcggacgaggcct

SEQ ID NO: 36164 - DNA, 16 bp, Artificial
  oligonucleotide probe
gcgacctcacgcgcag

SEQ ID NO: 36165 - DNA, 16 bp, Artificial
  oligonucleotide probe
gtccgggtcaggcagg

SEQ ID NO: 36166 - DNA, 16 bp, Artificial
  oligonucleotide probe
acgcagcggggtgacg

SEQ ID NO: 36167 - DNA, 16 bp, Artificial
  oligonucleotide probe
gcgacctcacgcgcag

SEQ ID NO: 36168 - DNA, 16 bp, Artificial
  oligonucleotide probe
agcggtccgcgagagc

SEQ ID NO: 36169 - DNA, 16 bp, Artificial
  oligonucleotide probe
tgctcggatgctgcga

SEQ ID NO: 36170 - DNA, 16 bp, Artificial
  oligonucleotide probe
gtgggggtgcagggaa

SEQ ID NO: 36171 - DNA, 16 bp, Artificial
  oligonucleotide probe
agcgcaccgacgacgc

SEQ ID NO: 36172 - DNA, 16 bp, Artificial
  oligonucleotide probe
acgcccaacagggagc

SEQ ID NO: 36173 - DNA, 16 bp, Artificial
  oligonucleotide probe
gagcgagcagcgggtc

SEQ ID NO: 36174 - DNA, 16 bp, Artificial
  oligonucleotide probe
agcgccaatcacgggt

SEQ ID NO: 36175 - DNA, 16 bp, Artificial
  oligonucleotide probe
gagcgcctcctcgagc

SEQ ID NO: 36176 - DNA, 16 bp, Artificial
  oligonucleotide probe
tggcacgcgagccagg

SEQ ID NO: 36177 - DNA, 16 bp, Artificial
  oligonucleotide probe
gagcgacgcgagagcg

SEQ ID NO: 36178 - DNA, 16 bp, Artificial
  oligonucleotide probe
gacgcaggcggagggt

SEQ ID NO: 36179 - DNA, 16 bp, Artificial
  oligonucleotide probe
ggtccggagcagacgc

SEQ ID NO: 36180 - DNA, 16 bp, Artificial
  oligonucleotide probe
gcgagtggcagggcct

SEQ ID NO: 36181 - DNA, 16 bp, Artificial
  oligonucleotide probe
cacccgagagcggtgg

SEQ ID NO: 36182 - DNA, 16 bp, Artificial
  oligonucleotide probe
agcggcgagagcgtcc

SEQ ID NO: 36183 - DNA, 16 bp, Artificial
  oligonucleotide probe
acgcccaacagggagc

SEQ ID NO: 36184 - DNA, 16 bp, Artificial
  oligonucleotide probe
cctcgtggcggacgga

SEQ ID NO: 36185 - DNA, 16 bp, Artificial
  oligonucleotide probe
gcgacgagcgagccaa

SEQ ID NO: 36186 - DNA, 16 bp, Artificial
  oligonucleotide probe
caggagcgggaagcga

SEQ ID NO: 36187 - DNA, 16 bp, Artificial
  oligonucleotide probe
gacggacgacgcgtgg

SEQ ID NO: 36188 - DNA, 16 bp, Artificial
  oligonucleotide probe
gcctgggtcaccacgc

SEQ ID NO: 36189 - DNA, 16 bp, Artificial
  oligonucleotide probe
gtggcgagcctcgggt

SEQ ID NO: 36190 - DNA, 16 bp, Artificial
  oligonucleotide probe
cgagcaccgagccgga

SEQ ID NO: 36191 - DNA, 16 bp, Artificial
  oligonucleotide probe
cgagcggaggtcccaa

SEQ ID NO: 36192 - DNA, 16 bp, Artificial
  oligonucleotide probe
ggaacggaagcggagc

SEQ ID NO: 36193 - DNA, 16 bp, Artificial
  oligonucleotide probe
gtggcgagcctcgggt

SEQ ID NO: 36194 - DNA, 16 bp, Artificial
  oligonucleotide probe
cgagcaccgagccgga

SEQ ID NO: 36195 - DNA, 16 bp, Artificial
  oligonucleotide probe
cggagcctgagcgtgg

SEQ ID NO: 36196 - DNA, 16 bp, Artificial
  oligonucleotide probe
actgcggacgaggcct

SEQ ID NO: 36197 - DNA, 16 bp, Artificial
  oligonucleotide probe
cagggcagggtcgggt

SEQ ID NO: 36198 - DNA, 16 bp, Artificial
  oligonucleotide probe
ggtcgcgacacctggc

SEQ ID NO: 36199 - DNA, 16 bp, Artificial
  oligonucleotide probe
acgcaccagtcccgga

SEQ ID NO: 36200 - DNA, 16 bp, Artificial
  oligonucleotide probe
caccgacgggaaacgc

SEQ ID NO: 36201 - DNA, 16 bp, Artificial
  oligonucleotide probe
gtggcgagcctcgggt

SEQ ID NO: 36202 - DNA, 16 bp, Artificial
  oligonucleotide probe
cgagcaccgagccgga

SEQ ID NO: 36203 - DNA, 16 bp, Artificial
  oligonucleotide probe
gcctcaggacgcacgc

SEQ ID NO: 36204 - DNA, 16 bp, Artificial
  oligonucleotide probe
agcgcaccgacgacgc

SEQ ID NO: 36205 - DNA, 16 bp, Artificial
  oligonucleotide probe
acgccaccgcctgacg

SEQ ID NO: 36206 - DNA, 16 bp, Artificial
  oligonucleotide probe
gggtagcggcgagacg

SEQ ID NO: 36207 - DNA, 16 bp, Artificial
  oligonucleotide probe
cggagcaggagcggaa

SEQ ID NO: 36208 - DNA, 16 bp, Artificial
  oligonucleotide probe
gtggcggaggtcggaa

SEQ ID NO: 36209 - DNA, 16 bp, Artificial
  oligonucleotide probe
agcgcaccgacgacgc

SEQ ID NO: 36210 - DNA, 16 bp, Artificial
  oligonucleotide probe
gtggcgagcctcgggt

SEQ ID NO: 36211 - DNA, 16 bp, Artificial
  oligonucleotide probe
tggcgggtgacggtgg

SEQ ID NO: 36212 - DNA, 16 bp, Artificial
  oligonucleotide probe
gtggcaggagcgacgc

SEQ ID NO: 36213 - DNA, 16 bp, Artificial
  oligonucleotide probe
gcgacagggcctgcct

SEQ ID NO: 36214 - DNA, 16 bp, Artificial
  oligonucleotide probe
tggcaccagcaggggt

SEQ ID NO: 36215 - DNA, 16 bp, Artificial
  oligonucleotide probe
cggagcaggagcggaa

SEQ ID NO: 36216 - DNA, 16 bp, Artificial
  oligonucleotide probe
gagcgagcagcgggtc

SEQ ID NO: 36217 - DNA, 16 bp, Artificial
  oligonucleotide probe
ggaacggaagcggagc

SEQ ID NO: 36218 - DNA, 16 bp, Artificial
  oligonucleotide probe
ggtcgcgacacctggc

SEQ ID NO: 36219 - DNA, 16 bp, Artificial
  oligonucleotide probe
gcctcaggacgcacgc

SEQ ID NO: 36220 - DNA, 16 bp, Artificial
  oligonucleotide probe
gcgacctcacgcgcag

SEQ ID NO: 36221 - DNA, 16 bp, Artificial
  oligonucleotide probe
acgcgagcgggtgcag

SEQ ID NO: 36222 - DNA, 16 bp, Artificial
  oligonucleotide probe
gcagcctctggccgag

SEQ ID NO: 36223 - DNA, 16 bp, Artificial
  oligonucleotide probe
cctccgaggacgcgga

SEQ ID NO: 36224 - DNA, 16 bp, Artificial
  oligonucleotide probe
gagcgcctcctcgagc

SEQ ID NO: 36225 - DNA, 16 bp, Artificial
  oligonucleotide probe
acgccaccgcctgacg

SEQ ID NO: 36226 - DNA, 16 bp, Artificial
  oligonucleotide probe
gggtagcggcgagacg

SEQ ID NO: 36227 - DNA, 16 bp, Artificial
  oligonucleotide probe
caggggaagggtcgga

SEQ ID NO: 36228 - DNA, 16 bp, Artificial
  oligonucleotide probe
gagcgcgacacccagg

SEQ ID NO: 36229 - DNA, 16 bp, Artificial
  oligonucleotide probe
gcctagcgcctcgacg

SEQ ID NO: 36230 - DNA, 16 bp, Artificial
  oligonucleotide probe
gcctcggagacggcag

SEQ ID NO: 36231 - DNA, 16 bp, Artificial
  oligonucleotide probe
cacccgagagcggtgg

SEQ ID NO: 36232 - DNA, 16 bp, Artificial
  oligonucleotide probe
tggcggtcgcctcgag

SEQ ID NO: 36233 - DNA, 16 bp, Artificial
  oligonucleotide probe
gggtacgcgacgcgag

SEQ ID NO: 36234 - DNA, 16 bp, Artificial
  oligonucleotide probe
gagcgacgcgagagcg

SEQ ID NO: 36235 - DNA, 16 bp, Artificial
  oligonucleotide probe
gagcgagcagcgggtc

SEQ ID NO: 36236 - DNA, 16 bp, Artificial
  oligonucleotide probe
cacccgagagcggtgg

SEQ ID NO: 36237 - DNA, 16 bp, Artificial
  oligonucleotide probe
cggagcctgagcgtgg

SEQ ID NO: 36238 - DNA, 16 bp, Artificial
  oligonucleotide probe
actgcggacgaggcct

SEQ ID NO: 36239 - DNA, 16 bp, Artificial
  oligonucleotide probe
acgccaccgcctgacg

SEQ ID NO: 36240 - DNA, 16 bp, Artificial
  oligonucleotide probe
gggtagcggcgagacg

SEQ ID NO: 36241 - DNA, 16 bp, Artificial
  oligonucleotide probe
agcgcaccgacgacgc

SEQ ID NO: 36242 - DNA, 16 bp, Artificial
  oligonucleotide probe
gtggcgagcctcgggt

SEQ ID NO: 36243 - DNA, 16 bp, Artificial
  oligonucleotide probe
tggcgtgggggtccaa

SEQ ID NO: 36244 - DNA, 16 bp, Artificial
  oligonucleotide probe
accatggcacgcgacg

SEQ ID NO: 36245 - DNA, 16 bp, Artificial
  oligonucleotide probe
caggcctccctcgcga

SEQ ID NO: 36246 - DNA, 16 bp, Artificial
  oligonucleotide probe
cggagcaggagcggaa

SEQ ID NO: 36247 - DNA, 16 bp, Artificial
  oligonucleotide probe
cagggcagggtcgggt

SEQ ID NO: 36248 - DNA, 16 bp, Artificial
  oligonucleotide probe
ggtcgcgacacctggc

SEQ ID NO: 36249 - DNA, 16 bp, Artificial
  oligonucleotide probe
gcgacctcacgcgcag

SEQ ID NO: 36250 - DNA, 16 bp, Artificial
  oligonucleotide probe
acgcccaacagggagc

SEQ ID NO: 36251 - DNA, 16 bp, Artificial
  oligonucleotide probe
gcgacagggcctgcct

SEQ ID NO: 36252 - DNA, 16 bp, Artificial
  oligonucleotide probe
tggcaccagcaggggt

SEQ ID NO: 36253 - DNA, 16 bp, Artificial
  oligonucleotide probe
cgagcggaggtcccaa

SEQ ID NO: 36254 - DNA, 16 bp, Artificial
  oligonucleotide probe
ggaacggaagcggagc

SEQ ID NO: 36255 - DNA, 16 bp, Artificial
  oligonucleotide probe
gtccgggtcaggcagg

SEQ ID NO: 36256 - DNA, 16 bp, Artificial
  oligonucleotide probe
acgcagcggggtgacg

SEQ ID NO: 36257 - DNA, 16 bp, Artificial
  oligonucleotide probe
gcgacagggcctgcct

SEQ ID NO: 36258 - DNA, 16 bp, Artificial
  oligonucleotide probe
cgagcggaggtcccaa

SEQ ID NO: 36259 - DNA, 16 bp, Artificial
  oligonucleotide probe
cctcgtggcggacgga

SEQ ID NO: 36260 - DNA, 16 bp, Artificial
  oligonucleotide probe
gcgacagggcctgcct

SEQ ID NO: 36261 - DNA, 16 bp, Artificial
  oligonucleotide probe
gagcgagcagcgggtc

SEQ ID NO: 36262 - DNA, 16 bp, Artificial
  oligonucleotide probe
cacccgagagcggtgg

SEQ ID NO: 36263 - DNA, 16 bp, Artificial
  oligonucleotide probe
cgagcggaggtcccaa

SEQ ID NO: 36264 - DNA, 16 bp, Artificial
  oligonucleotide probe
cagggcagggtcgggt

SEQ ID NO: 36265 - DNA, 16 bp, Artificial
  oligonucleotide probe
cctcgtggcggacgga

SEQ ID NO: 36266 - DNA, 16 bp, Artificial
  oligonucleotide probe
gcgacagggcctgcct

SEQ ID NO: 36267 - DNA, 16 bp, Artificial
  oligonucleotide probe
tgctcggatgctgcga

SEQ ID NO: 36268 - DNA, 16 bp, Artificial
  oligonucleotide probe
gtgggggtgcagggaa

SEQ ID NO: 36269 - DNA, 16 bp, Artificial
  oligonucleotide probe
cagggcagggtcgggt

SEQ ID NO: 36270 - DNA, 16 bp, Artificial
  oligonucleotide probe
gtccgggtcaggcagg

SEQ ID NO: 36271 - DNA, 16 bp, Artificial
  oligonucleotide probe
cctcgtggcggacgga

SEQ ID NO: 36272 - DNA, 16 bp, Artificial
  oligonucleotide probe
gcgaagcggcgaggtc

SEQ ID NO: 36273 - DNA, 16 bp, Artificial
  oligonucleotide probe
ggaacggaagcggagc

SEQ ID NO: 36274 - DNA, 16 bp, Artificial
  oligonucleotide probe
gacggcgagtgggcag

SEQ ID NO: 36275 - DNA, 16 bp, Artificial
  oligonucleotide probe
cagggcagggtcgggt

SEQ ID NO: 36276 - DNA, 16 bp, Artificial
  oligonucleotide probe
gtccgggtcaggcagg

SEQ ID NO: 36277 - DNA, 16 bp, Artificial
  oligonucleotide probe
actgcggacgaggcct

SEQ ID NO: 36278 - DNA, 16 bp, Artificial
  oligonucleotide probe
tggcgtgggggtccaa

SEQ ID NO: 36279 - DNA, 16 bp, Artificial
  oligonucleotide probe
cgagcggaggtcccaa

SEQ ID NO: 36280 - DNA, 16 bp, Artificial
  oligonucleotide probe
ggaacggaagcggagc

SEQ ID NO: 36281 - DNA, 16 bp, Artificial
  oligonucleotide probe
caccgggtggtcagcg

SEQ ID NO: 36282 - DNA, 16 bp, Artificial
  oligonucleotide probe
acgcaccagtcccgga

SEQ ID NO: 36283 - DNA, 16 bp, Artificial
  oligonucleotide probe
acgccaccgcctgacg

SEQ ID NO: 36284 - DNA, 16 bp, Artificial
  oligonucleotide probe
gggtagcggcgagacg

SEQ ID NO: 36285 - DNA, 16 bp, Artificial
  oligonucleotide probe
gtccacgctggcgacg

SEQ ID NO: 36286 - DNA, 16 bp, Artificial
  oligonucleotide probe
gcaggcagccaatggc

SEQ ID NO: 36287 - DNA, 16 bp, Artificial
  oligonucleotide probe
agcgcaccgacgacgc

SEQ ID NO: 36288 - DNA, 16 bp, Artificial
  oligonucleotide probe
gtggcgagcctcgggt

SEQ ID NO: 36289 - DNA, 16 bp, Artificial
  oligonucleotide probe
ggtcgcgacacctggc

SEQ ID NO: 36290 - DNA, 16 bp, Artificial
  oligonucleotide probe
gcctagcgcctcgacg

SEQ ID NO: 36291 - DNA, 16 bp, Artificial
  oligonucleotide probe
gcctcaggacgcacgc

SEQ ID NO: 36292 - DNA, 16 bp, Artificial
  oligonucleotide probe
agcgcaccgacgacgc

SEQ ID NO: 36293 - DNA, 16 bp, Artificial
  oligonucleotide probe
gagcgacgcgagagcg

SEQ ID NO: 36294 - DNA, 16 bp, Artificial
  oligonucleotide probe
actgcggacgaggcct

SEQ ID NO: 36295 - DNA, 16 bp, Artificial
  oligonucleotide probe
gcgacagggcctgcct

SEQ ID NO: 36296 - DNA, 16 bp, Artificial
  oligonucleotide probe
tggcaccagcaggggt

SEQ ID NO: 36297 - DNA, 16 bp, Artificial
  oligonucleotide probe
agcgcaccgacgacgc

SEQ ID NO: 36298 - DNA, 16 bp, Artificial
  oligonucleotide probe
acgcccaacagggagc

SEQ ID NO: 36299 - DNA, 16 bp, Artificial
  oligonucleotide probe
gagcgagcagcgggtc

SEQ ID NO: 36300 - DNA, 16 bp, Artificial
  oligonucleotide probe
cacccgagagcggtgg

SEQ ID NO: 36301 - DNA, 16 bp, Artificial
  oligonucleotide probe
gggtacgcgacgcgag

SEQ ID NO: 36302 - DNA, 16 bp, Artificial
  oligonucleotide probe
gagcgacgcgagagcg

SEQ ID NO: 36303 - DNA, 16 bp, Artificial
  oligonucleotide probe
acgcagcggggtgacg

SEQ ID NO: 36304 - DNA, 16 bp, Artificial
  oligonucleotide probe
caccgggtggtcagcg

SEQ ID NO: 36305 - DNA, 16 bp, Artificial
  oligonucleotide probe
gcgacctcacgcgcag

SEQ ID NO: 36306 - DNA, 16 bp, Artificial
  oligonucleotide probe
acgcccaacagggagc

SEQ ID NO: 36307 - DNA, 16 bp, Artificial
  oligonucleotide probe
caggcctccctcgcga

SEQ ID NO: 36308 - DNA, 16 bp, Artificial
  oligonucleotide probe
tgctcggatgctgcga

SEQ ID NO: 36309 - DNA, 16 bp, Artificial
  oligonucleotide probe
agcgccaatcacgggt

SEQ ID NO: 36310 - DNA, 16 bp, Artificial
  oligonucleotide probe
gcaggtggtggcgagc

SEQ ID NO: 36311 - DNA, 16 bp, Artificial
  oligonucleotide probe
acgcccaacagggagc

SEQ ID NO: 36312 - DNA, 16 bp, Artificial
  oligonucleotide probe
gcgacgagcgagccaa

SEQ ID NO: 36313 - DNA, 16 bp, Artificial
  oligonucleotide probe
gcctcaggacgcacgc

SEQ ID NO: 36314 - DNA, 16 bp, Artificial
  oligonucleotide probe
gcgacctcacgcgcag

SEQ ID NO: 36315 - DNA, 16 bp, Artificial
  oligonucleotide probe
cggagcctgagcgtgg

SEQ ID NO: 36316 - DNA, 16 bp, Artificial
  oligonucleotide probe
actgcggacgaggcct

SEQ ID NO: 36317 - DNA, 16 bp, Artificial
  oligonucleotide probe
cggagcctgagcgtgg

SEQ ID NO: 36318 - DNA, 16 bp, Artificial
  oligonucleotide probe
actgcggacgaggcct

SEQ ID NO: 36319 - DNA, 16 bp, Artificial
  oligonucleotide probe
cggagcctgagcgtgg

SEQ ID NO: 36320 - DNA, 16 bp, Artificial
  oligonucleotide probe
gcctcaggacgcacgc

SEQ ID NO: 36321 - DNA, 16 bp, Artificial
  oligonucleotide probe
cacccgagagcggtgg

SEQ ID NO: 36322 - DNA, 16 bp, Artificial
  oligonucleotide probe
agcggcgagagcgtcc

SEQ ID NO: 36323 - DNA, 16 bp, Artificial
  oligonucleotide probe
caccgcgaggtcacgc

SEQ ID NO: 36324 - DNA, 16 bp, Artificial
  oligonucleotide probe
gtccacgctggcgacg

SEQ ID NO: 36325 - DNA, 16 bp, Artificial
  oligonucleotide probe
gtggcgagcctcgggt

SEQ ID NO: 36326 - DNA, 16 bp, Artificial
  oligonucleotide probe
cctcgtggcggacgga

SEQ ID NO: 36327 - DNA, 16 bp, Artificial
  oligonucleotide probe
accacggaagcgcgga

SEQ ID NO: 36328 - DNA, 16 bp, Artificial
  oligonucleotide probe
ggtccggagcagacgc

SEQ ID NO: 36329 - DNA, 16 bp, Artificial
  oligonucleotide probe
agcggtccgcgagagc

SEQ ID NO: 36330 - DNA, 16 bp, Artificial
  oligonucleotide probe
caggggaagggtcgga

SEQ ID NO: 36331 - DNA, 16 bp, Artificial
  oligonucleotide probe
gtggcggaggtcggaa

SEQ ID NO: 36332 - DNA, 16 bp, Artificial
  oligonucleotide probe
caccgcgaggtcacgc

SEQ ID NO: 36333 - DNA, 16 bp, Artificial
  oligonucleotide probe
acgccaccgcctgacg

SEQ ID NO: 36334 - DNA, 16 bp, Artificial
  oligonucleotide probe
gggtacgcgacgcgag

SEQ ID NO: 36335 - DNA, 16 bp, Artificial
  oligonucleotide probe
cagggcagggtcgggt

SEQ ID NO: 36336 - DNA, 16 bp, Artificial
  oligonucleotide probe
ggtcgcgacacctggc

SEQ ID NO: 36337 - DNA, 16 bp, Artificial
  oligonucleotide probe
acgcagcggggtgacg

SEQ ID NO: 36338 - DNA, 16 bp, Artificial
  oligonucleotide probe
cggagcaggagcggaa

SEQ ID NO: 36339 - DNA, 16 bp, Artificial
  oligonucleotide probe
gcgaagcggcgaggtc

SEQ ID NO: 36340 - DNA, 16 bp, Artificial
  oligonucleotide probe
gcctgtgggtccgcga

SEQ ID NO: 36341 - DNA, 16 bp, Artificial
  oligonucleotide probe
gggtacgcgacgcgag

SEQ ID NO: 36342 - DNA, 16 bp, Artificial
  oligonucleotide probe
gagcgacgcgagagcg

SEQ ID NO: 36343 - DNA, 16 bp, Artificial
  oligonucleotide probe
gtccgggtcaggcagg

SEQ ID NO: 36344 - DNA, 16 bp, Artificial
  oligonucleotide probe
acgcagcggggtgacg

SEQ ID NO: 36345 - DNA, 16 bp, Artificial
  oligonucleotide probe
acgcagcggggtgacg

SEQ ID NO: 36346 - DNA, 16 bp, Artificial
  oligonucleotide probe
cggagcaggagcggaa

SEQ ID NO: 36347 - DNA, 16 bp, Artificial
  oligonucleotide probe
gcctgggtcaccacgc

SEQ ID NO: 36348 - DNA, 16 bp, Artificial
  oligonucleotide probe
ggaaagcggcctggaa

SEQ ID NO: 36349 - DNA, 16 bp, Artificial
  oligonucleotide probe
tgctcggatgctgcga

SEQ ID NO: 36350 - DNA, 16 bp, Artificial
  oligonucleotide probe
gtgggggtgcagggaa

SEQ ID NO: 36351 - DNA, 16 bp, Artificial
  oligonucleotide probe
caggcctccctcgcga

SEQ ID NO: 36352 - DNA, 16 bp, Artificial
  oligonucleotide probe
cggagcaggagcggaa

SEQ ID NO: 36353 - DNA, 16 bp, Artificial
  oligonucleotide probe
tgctcggatgctgcga

SEQ ID NO: 36354 - DNA, 16 bp, Artificial
  oligonucleotide probe
gagcgagcagcgggtc

SEQ ID NO: 36355 - DNA, 16 bp, Artificial
  oligonucleotide probe
caggcctccctcgcga

SEQ ID NO: 36356 - DNA, 16 bp, Artificial
  oligonucleotide probe
tgctcggatgctgcga

SEQ ID NO: 36357 - DNA, 16 bp, Artificial
  oligonucleotide probe
tggcggtcgcctcgag

SEQ ID NO: 36358 - DNA, 16 bp, Artificial
  oligonucleotide probe
tggcgggtgacggtgg

SEQ ID NO: 36359 - DNA, 16 bp, Artificial
  oligonucleotide probe
cgagcggaggtcccaa

SEQ ID NO: 36360 - DNA, 16 bp, Artificial
  oligonucleotide probe
ggaacggaagcggagc

SEQ ID NO: 36361 - DNA, 16 bp, Artificial
  oligonucleotide probe
gggtacgcgacgcgag

SEQ ID NO: 36362 - DNA, 16 bp, Artificial
  oligonucleotide probe
cggagcctgagcgtgg

SEQ ID NO: 36363 - DNA, 16 bp, Artificial
  oligonucleotide probe
cagggcagggtcgggt

SEQ ID NO: 36364 - DNA, 16 bp, Artificial
  oligonucleotide probe
ggtcgcgacacctggc

SEQ ID NO: 36365 - DNA, 16 bp, Artificial
  oligonucleotide probe
cacccgagagcggtgg

SEQ ID NO: 36366 - DNA, 16 bp, Artificial
  oligonucleotide probe
agcggcgagagcgtcc

SEQ ID NO: 36367 - DNA, 16 bp, Artificial
  oligonucleotide probe
ggtcgcgacacctggc

SEQ ID NO: 36368 - DNA, 16 bp, Artificial
  oligonucleotide probe
acgcagcggggtgacg

SEQ ID NO: 36369 - DNA, 16 bp, Artificial
  oligonucleotide probe
gcctcaggacgcacgc

SEQ ID NO: 36370 - DNA, 16 bp, Artificial
  oligonucleotide probe
gcgacctcacgcgcag

SEQ ID NO: 36371 - DNA, 16 bp, Artificial
  oligonucleotide probe
caggcctccctcgcga

SEQ ID NO: 36372 - DNA, 16 bp, Artificial
  oligonucleotide probe
tgctcggatgctgcga

SEQ ID NO: 36373 - DNA, 16 bp, Artificial
  oligonucleotide probe
gcctgtgggtccgcga

SEQ ID NO: 36374 - DNA, 16 bp, Artificial
  oligonucleotide probe
accacggaagcgcgga

SEQ ID NO: 36375 - DNA, 16 bp, Artificial
  oligonucleotide probe
gtggcaggagcgacgc

SEQ ID NO: 36376 - DNA, 16 bp, Artificial
  oligonucleotide probe
cctccgaggacgcgga

SEQ ID NO: 36377 - DNA, 16 bp, Artificial
  oligonucleotide probe
cgagcggaggtcccaa

SEQ ID NO: 36378 - DNA, 16 bp, Artificial
  oligonucleotide probe
ggaacggaagcggagc

SEQ ID NO: 36379 - DNA, 16 bp, Artificial
  oligonucleotide probe
acgccaccgcctgacg

SEQ ID NO: 36380 - DNA, 16 bp, Artificial
  oligonucleotide probe
gggtagcggcgagacg

SEQ ID NO: 36381 - DNA, 16 bp, Artificial
  oligonucleotide probe
acgccaccgcctgacg

SEQ ID NO: 36382 - DNA, 16 bp, Artificial
  oligonucleotide probe
gggtagcggcgagacg

SEQ ID NO: 36383 - DNA, 16 bp, Artificial
  oligonucleotide probe
gggtacgcgacgcgag

SEQ ID NO: 36384 - DNA, 16 bp, Artificial
  oligonucleotide probe
gagcgacgcgagagcg

SEQ ID NO: 36385 - DNA, 16 bp, Artificial
  oligonucleotide probe
cggagcctgagcgtgg

SEQ ID NO: 36386 - DNA, 16 bp, Artificial
  oligonucleotide probe
gcctcaggacgcacgc

SEQ ID NO: 36387 - DNA, 16 bp, Artificial
  oligonucleotide probe
cggagcaggagcggaa

SEQ ID NO: 36388 - DNA, 16 bp, Artificial
  oligonucleotide probe
gagcgagcagcgggtc

SEQ ID NO: 36389 - DNA, 16 bp, Artificial
  oligonucleotide probe
caggagcgggaagcga

SEQ ID NO: 36390 - DNA, 16 bp, Artificial
  oligonucleotide probe
acgcgagcgggtgcag

SEQ ID NO: 36391 - DNA, 16 bp, Artificial
  oligonucleotide probe
acgcccaacagggagc

SEQ ID NO: 36392 - DNA, 16 bp, Artificial
  oligonucleotide probe
cctcgtggcggacgga

SEQ ID NO: 36393 - DNA, 16 bp, Artificial
  oligonucleotide probe
gtccgggtcaggcagg

SEQ ID NO: 36394 - DNA, 16 bp, Artificial
  oligonucleotide probe
caggcctccctcgcga

SEQ ID NO: 36395 - DNA, 16 bp, Artificial
  oligonucleotide probe
gggtacgcgacgcgag

SEQ ID NO: 36396 - DNA, 16 bp, Artificial
  oligonucleotide probe
gcctcaggacgcacgc

SEQ ID NO: 36397 - DNA, 16 bp, Artificial
  oligonucleotide probe
cgagcggaggtcccaa

SEQ ID NO: 36398 - DNA, 16 bp, Artificial
  oligonucleotide probe
gtccgggtcaggcagg

SEQ ID NO: 36399 - DNA, 16 bp, Artificial
  oligonucleotide probe
tgctcggatgctgcga

SEQ ID NO: 36400 - DNA, 16 bp, Artificial
  oligonucleotide probe
cgagcaccgagccgga

SEQ ID NO: 36401 - DNA, 16 bp, Artificial
  oligonucleotide probe
gtggcgagcctcgggt

SEQ ID NO: 36402 - DNA, 16 bp, Artificial
  oligonucleotide probe
agcggcgagagcgtcc

SEQ ID NO: 36403 - DNA, 16 bp, Artificial
  oligonucleotide probe
cacccgagagcggtgg

SEQ ID NO: 36404 - DNA, 16 bp, Artificial
  oligonucleotide probe
tggcaccagcaggggt

SEQ ID NO: 36405 - DNA, 16 bp, Artificial
  oligonucleotide probe
acgcccaacagggagc

SEQ ID NO: 36406 - DNA, 16 bp, Artificial
  oligonucleotide probe
gcgacagggcctgcct

SEQ ID NO: 36407 - DNA, 16 bp, Artificial
  oligonucleotide probe
gggtagcggcgagacg

SEQ ID NO: 36408 - DNA, 16 bp, Artificial
  oligonucleotide probe
actgcggacgaggcct

SEQ ID NO: 36409 - DNA, 16 bp, Artificial
  oligonucleotide probe
ggtcgcgacacctggc

SEQ ID NO: 36410 - DNA, 16 bp, Artificial
  oligonucleotide probe
cggagcaggagcggaa

SEQ ID NO: 36411 - DNA, 16 bp, Artificial
  oligonucleotide probe
gagcgcgacacccagg

SEQ ID NO: 36412 - DNA, 16 bp, Artificial
  oligonucleotide probe
gcaggcagccaatggc

SEQ ID NO: 36413 - DNA, 16 bp, Artificial
  oligonucleotide probe
gacgcaggcggagggt

SEQ ID NO: 36414 - DNA, 16 bp, Artificial
  oligonucleotide probe
caccgacgggaaacgc

SEQ ID NO: 36415 - DNA, 16 bp, Artificial
  oligonucleotide probe
gacggcgagtgggcag

SEQ ID NO: 36416 - DNA, 16 bp, Artificial
  oligonucleotide probe
gcctcggagacggcag

SEQ ID NO: 36417 - DNA, 16 bp, Artificial
  oligonucleotide probe
ggaaagcggcctggaa

SEQ ID NO: 36418 - DNA, 16 bp, Artificial
  oligonucleotide probe
gggtagcggcgagacg

SEQ ID NO: 36419 - DNA, 16 bp, Artificial
  oligonucleotide probe
tggcacgcgagccagg

SEQ ID NO: 36420 - DNA, 16 bp, Artificial
  oligonucleotide probe
gcgagtggcagggcct

SEQ ID NO: 36421 - DNA, 16 bp, Artificial
  oligonucleotide probe
gcagcctctggccgag

SEQ ID NO: 36422 - DNA, 16 bp, Artificial
  oligonucleotide probe
accatggcacgcgacg

SEQ ID NO: 36423 - DNA, 16 bp, Artificial
  oligonucleotide probe
gcctcggagacggcag

SEQ ID NO: 36424 - DNA, 16 bp, Artificial
  oligonucleotide probe
gcctcggagacggcag

SEQ ID NO: 36425 - DNA, 16 bp, Artificial
  oligonucleotide probe
gcctagcgcctcgacg

SEQ ID NO: 36426 - DNA, 16 bp, Artificial
  oligonucleotide probe
gcctagcgcctcgacg

SEQ ID NO: 36427 - DNA, 16 bp, Artificial
  oligonucleotide probe
gacgcaggcggagggt

SEQ ID NO: 36428 - DNA, 16 bp, Artificial
  oligonucleotide probe
gacgcaggcggagggt

SEQ ID NO: 36429 - DNA, 16 bp, Artificial
  oligonucleotide probe
gacggcgagtgggcag

SEQ ID NO: 36430 - DNA, 16 bp, Artificial
  oligonucleotide probe
gacggcgagtgggcag

SEQ ID NO: 36431 - DNA, 16 bp, Artificial
  oligonucleotide probe
gtggcggaggtcggaa

SEQ ID NO: 36432 - DNA, 16 bp, Artificial
  oligonucleotide probe
gtggcggaggtcggaa

SEQ ID NO: 36433 - DNA, 16 bp, Artificial
  oligonucleotide probe
gacgcaggcggagggt

SEQ ID NO: 36434 - DNA, 16 bp, Artificial
  oligonucleotide probe
gacgcaggcggagggt

SEQ ID NO: 36435 - DNA, 16 bp, Artificial
  oligonucleotide probe
gcctagcgcctcgacg

SEQ ID NO: 36436 - DNA, 16 bp, Artificial
  oligonucleotide probe
gcctagcgcctcgacg

SEQ ID NO: 36437 - DNA, 16 bp, Artificial
  oligonucleotide probe
gacggcgagtgggcag

SEQ ID NO: 36438 - DNA, 16 bp, Artificial
  oligonucleotide probe
gacggcgagtgggcag

SEQ ID NO: 36439 - DNA, 16 bp, Artificial
  oligonucleotide probe
accatggcacgcgacg

SEQ ID NO: 36440 - DNA, 16 bp, Artificial
  oligonucleotide probe
accatggcacgcgacg

SEQ ID NO: 36441 - DNA, 16 bp, Artificial
  oligonucleotide probe
gcaggcagccaatggc

SEQ ID NO: 36442 - DNA, 16 bp, Artificial
  oligonucleotide probe
gcaggcagccaatggc

SEQ ID NO: 36443 - DNA, 16 bp, Artificial
  oligonucleotide probe
gacggcgagtgggcag

SEQ ID NO: 36444 - DNA, 16 bp, Artificial
  oligonucleotide probe
gacggcgagtgggcag

SEQ ID NO: 36445 - DNA, 16 bp, Artificial
  oligonucleotide probe
gacgcaggcggagggt

SEQ ID NO: 36446 - DNA, 16 bp, Artificial
  oligonucleotide probe
gacgcaggcggagggt

SEQ ID NO: 36447 - DNA, 16 bp, Artificial
  oligonucleotide probe
gcctcggagacggcag

SEQ ID NO: 36448 - DNA, 16 bp, Artificial
  oligonucleotide probe
gcctcggagacggcag

SEQ ID NO: 36449 - DNA, 16 bp, Artificial
  oligonucleotide probe
gcctcggagacggcag

SEQ ID NO: 36450 - DNA, 16 bp, Artificial
  oligonucleotide probe
gcctcggagacggcag

SEQ ID NO: 36451 - DNA, 16 bp, Artificial
  oligonucleotide probe
gtggcggaggtcggaa

SEQ ID NO: 36452 - DNA, 16 bp, Artificial
  oligonucleotide probe
gtggcggaggtcggaa

SEQ ID NO: 36453 - DNA, 16 bp, Artificial
  oligonucleotide probe
gacggcgagtgggcag

SEQ ID NO: 36454 - DNA, 16 bp, Artificial
  oligonucleotide probe
gacggcgagtgggcag

SEQ ID NO: 36455 - DNA, 16 bp, Artificial
  oligonucleotide probe
tggcgtgggggtccaa

SEQ ID NO: 36456 - DNA, 16 bp, Artificial
  oligonucleotide probe
tggcgtgggggtccaa

SEQ ID NO: 36457 - DNA, 16 bp, Artificial
  oligonucleotide probe
acgcaccagtcccgga

SEQ ID NO: 36458 - DNA, 16 bp, Artificial
  oligonucleotide probe
tggcgtgggggtccaa

SEQ ID NO: 36459 - DNA, 16 bp, Artificial
  oligonucleotide probe
gagcgcgacacccagg

SEQ ID NO: 36460 - DNA, 16 bp, Artificial
  oligonucleotide probe
gagcgcgacacccagg

SEQ ID NO: 36461 - DNA, 16 bp, Artificial
  oligonucleotide probe
tggcgtgggggtccaa

SEQ ID NO: 36462 - DNA, 16 bp, Artificial
  oligonucleotide probe
tggcgtgggggtccaa

SEQ ID NO: 36463 - DNA, 16 bp, Artificial
  oligonucleotide probe
accatggcacgcgacg

SEQ ID NO: 36464 - DNA, 16 bp, Artificial
  oligonucleotide probe
accatggcacgcgacg

SEQ ID NO: 36465 - DNA, 16 bp, Artificial
  oligonucleotide probe
gtggcggaggtcggaa

SEQ ID NO: 36466 - DNA, 16 bp, Artificial
  oligonucleotide probe
gtggcggaggtcggaa

SEQ ID NO: 36467 - DNA, 16 bp, Artificial
  oligonucleotide probe
gtccacgctggcgacg

SEQ ID NO: 36468 - DNA, 16 bp, Artificial
  oligonucleotide probe
gtccacgctggcgacg

SEQ ID NO: 36469 - DNA, 16 bp, Artificial
  oligonucleotide probe
gtggcggaggtcggaa

SEQ ID NO: 36470 - DNA, 16 bp, Artificial
  oligonucleotide probe
gtggcggaggtcggaa

SEQ ID NO: 36471 - DNA, 16 bp, Artificial
  oligonucleotide probe
caccgacgggaaacgc

SEQ ID NO: 36472 - DNA, 16 bp, Artificial
  oligonucleotide probe
caccgacgggaaacgc

SEQ ID NO: 36473 - DNA, 16 bp, Artificial
  oligonucleotide probe
agcggtccgcgagagc

SEQ ID NO: 36474 - DNA, 16 bp, Artificial
  oligonucleotide probe
agcggtccgcgagagc

SEQ ID NO: 36475 - DNA, 16 bp, Artificial
  oligonucleotide probe
gacggcgagtgggcag

SEQ ID NO: 36476 - DNA, 16 bp, Artificial
  oligonucleotide probe
gacggcgagtgggcag

SEQ ID NO: 36477 - DNA, 16 bp, Artificial
  oligonucleotide probe
caccgacgggaaacgc

SEQ ID NO: 36478 - DNA, 16 bp, Artificial
  oligonucleotide probe
caccgacgggaaacgc

SEQ ID NO: 36479 - DNA, 16 bp, Artificial
  oligonucleotide probe
caggggaagggtcgga

SEQ ID NO: 36480 - DNA, 16 bp, Artificial
  oligonucleotide probe
caggggaagggtcgga

SEQ ID NO: 36481 - DNA, 16 bp, Artificial
  oligonucleotide probe
gacgcaggcggagggt

SEQ ID NO: 36482 - DNA, 16 bp, Artificial
  oligonucleotide probe
gacgcaggcggagggt

SEQ ID NO: 36483 - DNA, 16 bp, Artificial
  oligonucleotide probe
caccgcgaggtcacgc

SEQ ID NO: 36484 - DNA, 16 bp, Artificial
  oligonucleotide probe
caccgcgaggtcacgc

SEQ ID NO: 36485 - DNA, 16 bp, Artificial
  oligonucleotide probe
agcggtccgcgagagc

SEQ ID NO: 36486 - DNA, 16 bp, Artificial
  oligonucleotide probe
agcggtccgcgagagc

SEQ ID NO: 36487 - DNA, 16 bp, Artificial
  oligonucleotide probe
gcctagcgcctcgacg

SEQ ID NO: 36488 - DNA, 16 bp, Artificial
  oligonucleotide probe
gcctagcgcctcgacg

SEQ ID NO: 36489 - DNA, 16 bp, Artificial
  oligonucleotide probe
caccgcgaggtcacgc

SEQ ID NO: 36490 - DNA, 16 bp, Artificial
  oligonucleotide probe
caccgcgaggtcacgc

SEQ ID NO: 36491 - DNA, 16 bp, Artificial
  oligonucleotide probe
gcctagcgcctcgacg

SEQ ID NO: 36492 - DNA, 16 bp, Artificial
  oligonucleotide probe
gcctagcgcctcgacg

SEQ ID NO: 36493 - DNA, 16 bp, Artificial
  oligonucleotide probe
gcctcggagacggcag

SEQ ID NO: 36494 - DNA, 16 bp, Artificial
  oligonucleotide probe
gcctcggagacggcag

SEQ ID NO: 36495 - DNA, 16 bp, Artificial
  oligonucleotide probe
caccgggtggtcagcg

SEQ ID NO: 36496 - DNA, 16 bp, Artificial
  oligonucleotide probe
caccgggtggtcagcg

SEQ ID NO: 36497 - DNA, 16 bp, Artificial
  oligonucleotide probe
gcaggcagccaatggc

SEQ ID NO: 36498 - DNA, 16 bp, Artificial
  oligonucleotide probe
gcaggcagccaatggc

SEQ ID NO: 36499 - DNA, 16 bp, Artificial
  oligonucleotide probe
acgcaccagtcccgga

SEQ ID NO: 36500 - DNA, 16 bp, Artificial
  oligonucleotide probe
acgcaccagtcccgga

SEQ ID NO: 36501 - DNA, 16 bp, Artificial
  oligonucleotide probe
gagcgcgacacccagg

SEQ ID NO: 36502 - DNA, 16 bp, Artificial
  oligonucleotide probe
gagcgcgacacccagg

SEQ ID NO: 36503 - DNA, 16 bp, Artificial
  oligonucleotide probe
tggcgtgggggtccaa

SEQ ID NO: 36504 - DNA, 16 bp, Artificial
  oligonucleotide probe
tggcgtgggggtccaa

SEQ ID NO: 36505 - DNA, 16 bp, Artificial
  oligonucleotide probe
gcaggcagccaatggc

SEQ ID NO: 36506 - DNA, 16 bp, Artificial
  oligonucleotide probe
gcaggcagccaatggc

SEQ ID NO: 36507 - DNA, 16 bp, Artificial
  oligonucleotide probe
acgcaccagtcccgga

SEQ ID NO: 36508 - DNA, 16 bp, Artificial
  oligonucleotide probe
acgcaccagtcccgga

SEQ ID NO: 36509 - DNA, 16 bp, Artificial
  oligonucleotide probe
caccgggtggtcagcg

SEQ ID NO: 36510 - DNA, 16 bp, Artificial
  oligonucleotide probe
caccgggtggtcagcg

SEQ ID NO: 36511 - DNA, 16 bp, Artificial
  oligonucleotide probe
caggagcgggaagcga

SEQ ID NO: 36512 - DNA, 16 bp, Artificial
  oligonucleotide probe
caggagcgggaagcga

SEQ ID NO: 36513 - DNA, 16 bp, Artificial
  oligonucleotide probe
caccgacgggaaacgc

SEQ ID NO: 36514 - DNA, 16 bp, Artificial
  oligonucleotide probe
caccgacgggaaacgc

SEQ ID NO: 36515 - DNA, 16 bp, Artificial
  oligonucleotide probe
gcctcggagacggcag

SEQ ID NO: 36516 - DNA, 16 bp, Artificial
  oligonucleotide probe
gcctcggagacggcag

SEQ ID NO: 36517 - DNA, 16 bp, Artificial
  oligonucleotide probe
acgcaccagtcccgga

SEQ ID NO: 36518 - DNA, 16 bp, Artificial
  oligonucleotide probe
acgcaccagtcccgga

SEQ ID NO: 36519 - DNA, 16 bp, Artificial
  oligonucleotide probe
agcggtccgcgagagc

SEQ ID NO: 36520 - DNA, 16 bp, Artificial
  oligonucleotide probe
agcggtccgcgagagc

SEQ ID NO: 36521 - DNA, 16 bp, Artificial
  oligonucleotide probe
gtggcggaggtcggaa

SEQ ID NO: 36522 - DNA, 16 bp, Artificial
  oligonucleotide probe
gtggcggaggtcggaa

SEQ ID NO: 36523 - DNA, 16 bp, Artificial
  oligonucleotide probe
accatggcacgcgacg

SEQ ID NO: 36524 - DNA, 16 bp, Artificial
  oligonucleotide probe
accatggcacgcgacg

SEQ ID NO: 36525 - DNA, 16 bp, Artificial
  oligonucleotide probe
caggggaagggtcgga

SEQ ID NO: 36526 - DNA, 16 bp, Artificial
  oligonucleotide probe
caggggaagggtcgga

SEQ ID NO: 36527 - DNA, 16 bp, Artificial
  oligonucleotide probe
caccgggtggtcagcg

SEQ ID NO: 36528 - DNA, 16 bp, Artificial
  oligonucleotide probe
caccgggtggtcagcg

SEQ ID NO: 36529 - DNA, 16 bp, Artificial
  oligonucleotide probe
gcctagcgcctcgacg

SEQ ID NO: 36530 - DNA, 16 bp, Artificial
  oligonucleotide probe
gcctagcgcctcgacg

SEQ ID NO: 36531 - DNA, 16 bp, Artificial
  oligonucleotide probe
gacgcaggcggagggt

SEQ ID NO: 36532 - DNA, 16 bp, Artificial
  oligonucleotide probe
gacgcaggcggagggt

SEQ ID NO: 36533 - DNA, 16 bp, Artificial
  oligonucleotide probe
gacggcgagtgggcag

SEQ ID NO: 36534 - DNA, 16 bp, Artificial
  oligonucleotide probe
gacggcgagtgggcag

SEQ ID NO: 36535 - DNA, 16 bp, Artificial
  oligonucleotide probe
gtggcggaggtcggaa

SEQ ID NO: 36536 - DNA, 16 bp, Artificial
  oligonucleotide probe
gtggcggaggtcggaa

SEQ ID NO: 36537 - DNA, 16 bp, Artificial
  oligonucleotide probe
gtggcggaggtcggaa

SEQ ID NO: 36538 - DNA, 16 bp, Artificial
  oligonucleotide probe
gtggcggaggtcggaa

SEQ ID NO: 36539 - DNA, 16 bp, Artificial
  oligonucleotide probe
caccgacgggaaacgc

SEQ ID NO: 36540 - DNA, 16 bp, Artificial
  oligonucleotide probe
caccgacgggaaacgc

SEQ ID NO: 36541 - DNA, 16 bp, Artificial
  oligonucleotide probe
caccgggtggtcagcg

SEQ ID NO: 36542 - DNA, 16 bp, Artificial
  oligonucleotide probe
caccgggtggtcagcg

SEQ ID NO: 36543 - DNA, 16 bp, Artificial
  oligonucleotide probe
caggggaagggtcgga

SEQ ID NO: 36544 - DNA, 16 bp, Artificial
  oligonucleotide probe
caggggaagggtcgga

SEQ ID NO: 36545 - DNA, 16 bp, Artificial
  oligonucleotide probe
agcggtccgcgagagc

SEQ ID NO: 36546 - DNA, 16 bp, Artificial
  oligonucleotide probe
agcggtccgcgagagc

SEQ ID NO: 36547 - DNA, 16 bp, Artificial
  oligonucleotide probe
caccgcgaggtcacgc

SEQ ID NO: 36548 - DNA, 16 bp, Artificial
  oligonucleotide probe
caccgcgaggtcacgc

SEQ ID NO: 36549 - DNA, 16 bp, Artificial
  oligonucleotide probe
gcctcggagacggcag

SEQ ID NO: 36550 - DNA, 16 bp, Artificial
  oligonucleotide probe
gcctcggagacggcag

SEQ ID NO: 36551 - DNA, 16 bp, Artificial
  oligonucleotide probe
acgcaccagtcccgga

SEQ ID NO: 36552 - DNA, 16 bp, Artificial
  oligonucleotide probe
acgcaccagtcccgga

SEQ ID NO: 36553 - DNA, 16 bp, Artificial
  oligonucleotide probe
gcaggcagccaatggc

SEQ ID NO: 36554 - DNA, 16 bp, Artificial
  oligonucleotide probe
gcaggcagccaatggc

SEQ ID NO: 36555 - DNA, 16 bp, Artificial
  oligonucleotide probe
gcaggtggtggcgagc

SEQ ID NO: 36556 - DNA, 16 bp, Artificial
  oligonucleotide probe
gcaggtggtggcgagc

SEQ ID NO: 36557 - DNA, 16 bp, Artificial
  oligonucleotide probe
caggggaagggtcgga

SEQ ID NO: 36558 - DNA, 16 bp, Artificial
  oligonucleotide probe
caggggaagggtcgga

SEQ ID NO: 36559 - DNA, 16 bp, Artificial
  oligonucleotide probe
caggagcgggaagcga

SEQ ID NO: 36560 - DNA, 16 bp, Artificial
  oligonucleotide probe
caggagcgggaagcga

SEQ ID NO: 36561 - DNA, 16 bp, Artificial
  oligonucleotide probe
gacgcaggcggagggt

SEQ ID NO: 36562 - DNA, 16 bp, Artificial
  oligonucleotide probe
gacgcaggcggagggt

SEQ ID NO: 36563 - DNA, 16 bp, Artificial
  oligonucleotide probe
gcctagcgcctcgacg

SEQ ID NO: 36564 - DNA, 16 bp, Artificial
  oligonucleotide probe
gcctagcgcctcgacg

SEQ ID NO: 36565 - DNA, 16 bp, Artificial
  oligonucleotide probe
gacggacgacgcgtgg

SEQ ID NO: 36566 - DNA, 16 bp, Artificial
  oligonucleotide probe
gacggacgacgcgtgg

SEQ ID NO: 36567 - DNA, 16 bp, Artificial
  oligonucleotide probe
caccgcgaggtcacgc

SEQ ID NO: 36568 - DNA, 16 bp, Artificial
  oligonucleotide probe
caccgcgaggtcacgc

SEQ ID NO: 36569 - DNA, 16 bp, Artificial
  oligonucleotide probe
acgcgagcgggtgcag

SEQ ID NO: 36570 - DNA, 16 bp, Artificial
  oligonucleotide probe
acgcgagcgggtgcag

SEQ ID NO: 36571 - DNA, 16 bp, Artificial
  oligonucleotide probe
tggcgtgggggtccaa

SEQ ID NO: 36572 - DNA, 16 bp, Artificial
  oligonucleotide probe
tggcgtgggggtccaa

SEQ ID NO: 36573 - DNA, 16 bp, Artificial
  oligonucleotide probe
gcctcggagacggcag

SEQ ID NO: 36574 - DNA, 16 bp, Artificial
  oligonucleotide probe
gcctcggagacggcag

SEQ ID NO: 36575 - DNA, 16 bp, Artificial
  oligonucleotide probe
accatggcacgcgacg

SEQ ID NO: 36576 - DNA, 16 bp, Artificial
  oligonucleotide probe
accatggcacgcgacg

SEQ ID NO: 36577 - DNA, 16 bp, Artificial
  oligonucleotide probe
gtccacgctggcgacg

SEQ ID NO: 36578 - DNA, 16 bp, Artificial
  oligonucleotide probe
gtccacgctggcgacg

SEQ ID NO: 36579 - DNA, 16 bp, Artificial
  oligonucleotide probe
gacggcgagtgggcag

SEQ ID NO: 36580 - DNA, 16 bp, Artificial
  oligonucleotide probe
gacggcgagtgggcag

SEQ ID NO: 36581 - DNA, 16 bp, Artificial
  oligonucleotide probe
caggggaagggtcgga

SEQ ID NO: 36582 - DNA, 16 bp, Artificial
  oligonucleotide probe
caggggaagggtcgga

SEQ ID NO: 36583 - DNA, 16 bp, Artificial
  oligonucleotide probe
tggcgtgggggtccaa

SEQ ID NO: 36584 - DNA, 16 bp, Artificial
  oligonucleotide probe
tggcgtgggggtccaa

SEQ ID NO: 36585 - DNA, 16 bp, Artificial
  oligonucleotide probe
gagcgcgacacccagg

SEQ ID NO: 36586 - DNA, 16 bp, Artificial
  oligonucleotide probe
gagcgcgacacccagg

SEQ ID NO: 36587 - DNA, 16 bp, Artificial
  oligonucleotide probe
gacggcgagtgggcag

SEQ ID NO: 36588 - DNA, 16 bp, Artificial
  oligonucleotide probe
gacggcgagtgggcag

SEQ ID NO: 36589 - DNA, 16 bp, Artificial
  oligonucleotide probe
gacggcgagtgggcag

SEQ ID NO: 36590 - DNA, 16 bp, Artificial
  oligonucleotide probe
gacggcgagtgggcag

SEQ ID NO: 36591 - DNA, 16 bp, Artificial
  oligonucleotide probe
gcctagcgcctcgacg

SEQ ID NO: 36592 - DNA, 16 bp, Artificial
  oligonucleotide probe
gcctagcgcctcgacg

SEQ ID NO: 36593 - DNA, 16 bp, Artificial
  oligonucleotide probe
gacgcaggcggagggt

SEQ ID NO: 36594 - DNA, 16 bp, Artificial
  oligonucleotide probe
gacgcaggcggagggt

SEQ ID NO: 36595 - DNA, 16 bp, Artificial
  oligonucleotide probe
tggcgtgggggtccaa

SEQ ID NO: 36596 - DNA, 16 bp, Artificial
  oligonucleotide probe
tggcgtgggggtccaa

SEQ ID NO: 36597 - DNA, 16 bp, Artificial
  oligonucleotide probe
gacggcgagtgggcag

SEQ ID NO: 36598 - DNA, 16 bp, Artificial
  oligonucleotide probe
gacggcgagtgggcag

SEQ ID NO: 36599 - DNA, 16 bp, Artificial
  oligonucleotide probe
gtccacgctggcgacg

SEQ ID NO: 36600 - DNA, 16 bp, Artificial
  oligonucleotide probe
gtccacgctggcgacg

SEQ ID NO: 36601 - DNA, 16 bp, Artificial
  oligonucleotide probe
accatggcacgcgacg

SEQ ID NO: 36602 - DNA, 16 bp, Artificial
  oligonucleotide probe
accatggcacgcgacg

SEQ ID NO: 36603 - DNA, 16 bp, Artificial
  oligonucleotide probe
gtggcggaggtcggaa

SEQ ID NO: 36604 - DNA, 16 bp, Artificial
  oligonucleotide probe
gtggcggaggtcggaa

SEQ ID NO: 36605 - DNA, 16 bp, Artificial
  oligonucleotide probe
gcgacgagcgagccaa

SEQ ID NO: 36606 - DNA, 16 bp, Artificial
  oligonucleotide probe
gcgacgagcgagccaa

SEQ ID NO: 36607 - DNA, 16 bp, Artificial
  oligonucleotide probe
gcgacgagcgagccaa

SEQ ID NO: 36608 - DNA, 16 bp, Artificial
  oligonucleotide probe
gcgacgagcgagccaa

SEQ ID NO: 36609 - DNA, 16 bp, Artificial
  oligonucleotide probe
caccgcgaggtcacgc

SEQ ID NO: 36610 - DNA, 16 bp, Artificial
  oligonucleotide probe
caccgcgaggtcacgc

SEQ ID NO: 36611 - DNA, 16 bp, Artificial
  oligonucleotide probe
agcgccaatcacgggt

SEQ ID NO: 36612 - DNA, 16 bp, Artificial
  oligonucleotide probe
agcgccaatcacgggt

SEQ ID NO: 36613 - DNA, 16 bp, Artificial
  oligonucleotide probe
caccgacgggaaacgc

SEQ ID NO: 36614 - DNA, 16 bp, Artificial
  oligonucleotide probe
caccgacgggaaacgc

SEQ ID NO: 36615 - DNA, 16 bp, Artificial
  oligonucleotide probe
caccgggtggtcagcg

SEQ ID NO: 36616 - DNA, 16 bp, Artificial
  oligonucleotide probe
caccgggtggtcagcg

SEQ ID NO: 36617 - DNA, 16 bp, Artificial
  oligonucleotide probe
gcaggcagccaatggc

SEQ ID NO: 36618 - DNA, 16 bp, Artificial
  oligonucleotide probe
gcaggcagccaatggc

SEQ ID NO: 36619 - DNA, 16 bp, Artificial
  oligonucleotide probe
gcctagcgcctcgacg

SEQ ID NO: 36620 - DNA, 16 bp, Artificial
  oligonucleotide probe
gcctagcgcctcgacg

SEQ ID NO: 36621 - DNA, 16 bp, Artificial
  oligonucleotide probe
tggcgtgggggtccaa

SEQ ID NO: 36622 - DNA, 16 bp, Artificial
  oligonucleotide probe
tggcgtgggggtccaa

SEQ ID NO: 36623 - DNA, 16 bp, Artificial
  oligonucleotide probe
acgcaccagtcccgga

SEQ ID NO: 36624 - DNA, 16 bp, Artificial
  oligonucleotide probe
acgcaccagtcccgga

SEQ ID NO: 36625 - DNA, 16 bp, Artificial
  oligonucleotide probe
caccgcgaggtcacgc

SEQ ID NO: 36626 - DNA, 16 bp, Artificial
  oligonucleotide probe
caccgcgaggtcacgc

SEQ ID NO: 36627 - DNA, 16 bp, Artificial
  oligonucleotide probe
gagcgcgacacccagg

SEQ ID NO: 36628 - DNA, 16 bp, Artificial
  oligonucleotide probe
gagcgcgacacccagg

SEQ ID NO: 36629 - DNA, 16 bp, Artificial
  oligonucleotide probe
gcctcggagacggcag

SEQ ID NO: 36630 - DNA, 16 bp, Artificial
  oligonucleotide probe
gcctcggagacggcag

SEQ ID NO: 36631 - DNA, 16 bp, Artificial
  oligonucleotide probe
tggcgtgggggtccaa

SEQ ID NO: 36632 - DNA, 16 bp, Artificial
  oligonucleotide probe
tggcgtgggggtccaa

SEQ ID NO: 36633 - DNA, 16 bp, Artificial
  oligonucleotide probe
gcctagcgcctcgacg

SEQ ID NO: 36634 - DNA, 16 bp, Artificial
  oligonucleotide probe
gcctagcgcctcgacg

SEQ ID NO: 36635 - DNA, 16 bp, Artificial
  oligonucleotide probe
gacggcgagtgggcag

SEQ ID NO: 36636 - DNA, 16 bp, Artificial
  oligonucleotide probe
gacggcgagtgggcag

SEQ ID NO: 36637 - DNA, 16 bp, Artificial
  oligonucleotide probe
gcctcggagacggcag

SEQ ID NO: 36638 - DNA, 16 bp, Artificial
  oligonucleotide probe
gcctcggagacggcag

SEQ ID NO: 36639 - DNA, 16 bp, Artificial
  oligonucleotide probe
tggcgtgggggtccaa

SEQ ID NO: 36640 - DNA, 16 bp, Artificial
  oligonucleotide probe
tggcgtgggggtccaa

SEQ ID NO: 36641 - DNA, 16 bp, Artificial
  oligonucleotide probe
accatggcacgcgacg

SEQ ID NO: 36642 - DNA, 16 bp, Artificial
  oligonucleotide probe
accatggcacgcgacg

SEQ ID NO: 36643 - DNA, 16 bp, Artificial
  oligonucleotide probe
gacgcaggcggagggt

SEQ ID NO: 36644 - DNA, 16 bp, Artificial
  oligonucleotide probe
gacgcaggcggagggt

SEQ ID NO: 36645 - DNA, 16 bp, Artificial
  oligonucleotide probe
gtggcggaggtcggaa

SEQ ID NO: 36646 - DNA, 16 bp, Artificial
  oligonucleotide probe
gtggcggaggtcggaa

SEQ ID NO: 36647 - DNA, 16 bp, Artificial
  oligonucleotide probe
gagcgcgacacccagg

SEQ ID NO: 36648 - DNA, 16 bp, Artificial
  oligonucleotide probe
gagcgcgacacccagg

SEQ ID NO: 36649 - DNA, 16 bp, Artificial
  oligonucleotide probe
accatggcacgcgacg

SEQ ID NO: 36650 - DNA, 16 bp, Artificial
  oligonucleotide probe
accatggcacgcgacg

SEQ ID NO: 36651 - DNA, 16 bp, Artificial
  oligonucleotide probe
caccgggtggtcagcg

SEQ ID NO: 36652 - DNA, 16 bp, Artificial
  oligonucleotide probe
caccgggtggtcagcg

SEQ ID NO: 36653 - DNA, 16 bp, Artificial
  oligonucleotide probe
gcctagcgcctcgacg

SEQ ID NO: 36654 - DNA, 16 bp, Artificial
  oligonucleotide probe
gcctagcgcctcgacg

SEQ ID NO: 36655 - DNA, 16 bp, Artificial
  oligonucleotide probe
gacggcgagtgggcag

SEQ ID NO: 36656 - DNA, 16 bp, Artificial
  oligonucleotide probe
gacggcgagtgggcag

SEQ ID NO: 36657 - DNA, 16 bp, Artificial
  oligonucleotide probe
gcagcctctggccgag

SEQ ID NO: 36658 - DNA, 16 bp, Artificial
  oligonucleotide probe
gcagcctctggccgag

SEQ ID NO: 36659 - DNA, 16 bp, Artificial
  oligonucleotide probe
gacgcaggcggagggt

SEQ ID NO: 36660 - DNA, 16 bp, Artificial
  oligonucleotide probe
gacgcaggcggagggt

SEQ ID NO: 36661 - DNA, 16 bp, Artificial
  oligonucleotide probe
caccgggtggtcagcg

SEQ ID NO: 36662 - DNA, 16 bp, Artificial
  oligonucleotide probe
caccgggtggtcagcg

SEQ ID NO: 36663 - DNA, 16 bp, Artificial
  oligonucleotide probe
agcggtccgcgagagc

SEQ ID NO: 36664 - DNA, 16 bp, Artificial
  oligonucleotide probe
agcggtccgcgagagc

SEQ ID NO: 36665 - DNA, 16 bp, Artificial
  oligonucleotide probe
gacggcgagtgggcag

SEQ ID NO: 36666 - DNA, 16 bp, Artificial
  oligonucleotide probe
gacggcgagtgggcag

SEQ ID NO: 36667 - DNA, 16 bp, Artificial
  oligonucleotide probe
acgcaccagtcccgga

SEQ ID NO: 36668 - DNA, 16 bp, Artificial
  oligonucleotide probe
acgcaccagtcccgga

SEQ ID NO: 36669 - DNA, 16 bp, Artificial
  oligonucleotide probe
gcctagcgcctcgacg

SEQ ID NO: 36670 - DNA, 16 bp, Artificial
  oligonucleotide probe
gcctagcgcctcgacg

SEQ ID NO: 36671 - DNA, 16 bp, Artificial
  oligonucleotide probe
caccgacgggaaacgc

SEQ ID NO: 36672 - DNA, 16 bp, Artificial
  oligonucleotide probe
caccgacgggaaacgc

SEQ ID NO: 36673 - DNA, 16 bp, Artificial
  oligonucleotide probe
gcctcggagacggcag

SEQ ID NO: 36674 - DNA, 16 bp, Artificial
  oligonucleotide probe
gcctcggagacggcag

SEQ ID NO: 36675 - DNA, 16 bp, Artificial
  oligonucleotide probe
agcggtccgcgagagc

SEQ ID NO: 36676 - DNA, 16 bp, Artificial
  oligonucleotide probe
agcggtccgcgagagc

SEQ ID NO: 36677 - DNA, 16 bp, Artificial
  oligonucleotide probe
gacgcaggcggagggt

SEQ ID NO: 36678 - DNA, 16 bp, Artificial
  oligonucleotide probe
gacgcaggcggagggt

SEQ ID NO: 36679 - DNA, 16 bp, Artificial
  oligonucleotide probe
gtccacgctggcgacg

SEQ ID NO: 36680 - DNA, 16 bp, Artificial
  oligonucleotide probe
gtccacgctggcgacg

SEQ ID NO: 36681 - DNA, 16 bp, Artificial
  oligonucleotide probe
gacgcaggcggagggt

SEQ ID NO: 36682 - DNA, 16 bp, Artificial
  oligonucleotide probe
gacgcaggcggagggt

SEQ ID NO: 36683 - DNA, 16 bp, Artificial
  oligonucleotide probe
agcggtccgcgagagc

SEQ ID NO: 36684 - DNA, 16 bp, Artificial
  oligonucleotide probe
agcggtccgcgagagc

SEQ ID NO: 36685 - DNA, 16 bp, Artificial
  oligonucleotide probe
agcgccaatcacgggt

SEQ ID NO: 36686 - DNA, 16 bp, Artificial
  oligonucleotide probe
agcgccaatcacgggt

SEQ ID NO: 36687 - DNA, 16 bp, Artificial
  oligonucleotide probe
gcgagtggcagggcct

SEQ ID NO: 36688 - DNA, 16 bp, Artificial
  oligonucleotide probe
gcgagtggcagggcct

SEQ ID NO: 36689 - DNA, 16 bp, Artificial
  oligonucleotide probe
gcgagtggcagggcct

SEQ ID NO: 36690 - DNA, 16 bp, Artificial
  oligonucleotide probe
gcgagtggcagggcct

SEQ ID NO: 36691 - DNA, 16 bp, Artificial
  oligonucleotide probe
gcgacgagcgagccaa

SEQ ID NO: 36692 - DNA, 16 bp, Artificial
  oligonucleotide probe
acgcgagcgggtgcag

SEQ ID NO: 36693 - DNA, 16 bp, Artificial
  oligonucleotide probe
gcaggtggtggcgagc

SEQ ID NO: 36694 - DNA, 16 bp, Artificial
  oligonucleotide probe
ggaaagcggcctggaa

SEQ ID NO: 36695 - DNA, 16 bp, Artificial
  oligonucleotide probe
gcctgggtcaccacgc

SEQ ID NO: 36696 - DNA, 16 bp, Artificial
  oligonucleotide probe
cctccgaggacgcgga

SEQ ID NO: 36697 - DNA, 16 bp, Artificial
  oligonucleotide probe
cctccgaggacgcgga

SEQ ID NO: 36698 - DNA, 16 bp, Artificial
  oligonucleotide probe
gcagcctctggccgag

SEQ ID NO: 36699 - DNA, 16 bp, Artificial
  oligonucleotide probe
gcagcctctggccgag

SEQ ID NO: 36700 - DNA, 16 bp, Artificial
  oligonucleotide probe
agcggtccgcgagagc

SEQ ID NO: 36701 - DNA, 16 bp, Artificial
  oligonucleotide probe
agcggtccgcgagagc

SEQ ID NO: 36702 - DNA, 16 bp, Artificial
  oligonucleotide probe
caccgacgggaaacgc

SEQ ID NO: 36703 - DNA, 16 bp, Artificial
  oligonucleotide probe
caccgacgggaaacgc

SEQ ID NO: 36704 - DNA, 16 bp, Artificial
  oligonucleotide probe
tggcggtcgcctcgag

SEQ ID NO: 36705 - DNA, 16 bp, Artificial
  oligonucleotide probe
tggcggtcgcctcgag

SEQ ID NO: 36706 - DNA, 16 bp, Artificial
  oligonucleotide probe
gcctagcgcctcgacg

SEQ ID NO: 36707 - DNA, 16 bp, Artificial
  oligonucleotide probe
gcctagcgcctcgacg

SEQ ID NO: 36708 - DNA, 16 bp, Artificial
  oligonucleotide probe
gtggcaggagcgacgc

SEQ ID NO: 36709 - DNA, 16 bp, Artificial
  oligonucleotide probe
gtggcaggagcgacgc

SEQ ID NO: 36710 - DNA, 16 bp, Artificial
  oligonucleotide probe
gcaggcagccaatggc

SEQ ID NO: 36711 - DNA, 16 bp, Artificial
  oligonucleotide probe
gcaggcagccaatggc

SEQ ID NO: 36712 - DNA, 16 bp, Artificial
  oligonucleotide probe
accacggaagcgcgga

SEQ ID NO: 36713 - DNA, 16 bp, Artificial
  oligonucleotide probe
accacggaagcgcgga

SEQ ID NO: 36714 - DNA, 16 bp, Artificial
  oligonucleotide probe
gacgcaggcggagggt

SEQ ID NO: 36715 - DNA, 16 bp, Artificial
  oligonucleotide probe
gacgcaggcggagggt

SEQ ID NO: 36716 - DNA, 16 bp, Artificial
  oligonucleotide probe
agcgccaatcacgggt

SEQ ID NO: 36717 - DNA, 16 bp, Artificial
  oligonucleotide probe
agcgccaatcacgggt

SEQ ID NO: 36718 - DNA, 16 bp, Artificial
  oligonucleotide probe
caggagcgggaagcga

SEQ ID NO: 36719 - DNA, 16 bp, Artificial
  oligonucleotide probe
caggagcgggaagcga

SEQ ID NO: 36720 - DNA, 16 bp, Artificial
  oligonucleotide probe
gcaggtggtggcgagc

SEQ ID NO: 36721 - DNA, 16 bp, Artificial
  oligonucleotide probe
gcaggtggtggcgagc

SEQ ID NO: 36722 - DNA, 16 bp, Artificial
  oligonucleotide probe
ggtccggagcagacgc

SEQ ID NO: 36723 - DNA, 16 bp, Artificial
  oligonucleotide probe
ggtccggagcagacgc

SEQ ID NO: 36724 - DNA, 16 bp, Artificial
  oligonucleotide probe
gagcgcgacacccagg

SEQ ID NO: 36725 - DNA, 16 bp, Artificial
  oligonucleotide probe
gagcgcgacacccagg

SEQ ID NO: 36726 - DNA, 16 bp, Artificial
  oligonucleotide probe
acgcgagcgggtgcag

SEQ ID NO: 36727 - DNA, 16 bp, Artificial
  oligonucleotide probe
acgcgagcgggtgcag

SEQ ID NO: 36728 - DNA, 16 bp, Artificial
  oligonucleotide probe
gcctgggtcaccacgc

SEQ ID NO: 36729 - DNA, 16 bp, Artificial
  oligonucleotide probe
gcctgggtcaccacgc

SEQ ID NO: 36730 - DNA, 16 bp, Artificial
  oligonucleotide probe
gagcgcctcctcgagc

SEQ ID NO: 36731 - DNA, 16 bp, Artificial
  oligonucleotide probe
gagcgcctcctcgagc

SEQ ID NO: 36732 - DNA, 16 bp, Artificial
  oligonucleotide probe
gcagcctctggccgag

SEQ ID NO: 36733 - DNA, 16 bp, Artificial
  oligonucleotide probe
gcagcctctggccgag

SEQ ID NO: 36734 - DNA, 16 bp, Artificial
  oligonucleotide probe
tggcggtcgcctcgag

SEQ ID NO: 36735 - DNA, 16 bp, Artificial
  oligonucleotide probe
tggcggtcgcctcgag

SEQ ID NO: 36736 - DNA, 16 bp, Artificial
  oligonucleotide probe
gcgaagcggcgaggtc

SEQ ID NO: 36737 - DNA, 16 bp, Artificial
  oligonucleotide probe
gcgaagcggcgaggtc

SEQ ID NO: 36738 - DNA, 16 bp, Artificial
  oligonucleotide probe
gtccacgctggcgacg

SEQ ID NO: 36739 - DNA, 16 bp, Artificial
  oligonucleotide probe
gtccacgctggcgacg

SEQ ID NO: 36740 - DNA, 16 bp, Artificial
  oligonucleotide probe
gcctgtgggtccgcga

SEQ ID NO: 36741 - DNA, 16 bp, Artificial
  oligonucleotide probe
gcctgtgggtccgcga

SEQ ID NO: 36742 - DNA, 16 bp, Artificial
  oligonucleotide probe
accacggaagcgcgga

SEQ ID NO: 36743 - DNA, 16 bp, Artificial
  oligonucleotide probe
accacggaagcgcgga

SEQ ID NO: 36744 - DNA, 16 bp, Artificial
  oligonucleotide probe
acgcaccagtcccgga

SEQ ID NO: 36745 - DNA, 16 bp, Artificial
  oligonucleotide probe
acgcaccagtcccgga

SEQ ID NO: 36746 - DNA, 16 bp, Artificial
  oligonucleotide probe
gcgaagcggcgaggtc

SEQ ID NO: 36747 - DNA, 16 bp, Artificial
  oligonucleotide probe
gcgaagcggcgaggtc

SEQ ID NO: 36748 - DNA, 16 bp, Artificial
  oligonucleotide probe
gcctcggagacggcag

SEQ ID NO: 36749 - DNA, 16 bp, Artificial
  oligonucleotide probe
gcctcggagacggcag

SEQ ID NO: 36750 - DNA, 16 bp, Artificial
  oligonucleotide probe
gcagcctctggccgag

SEQ ID NO: 36751 - DNA, 16 bp, Artificial
  oligonucleotide probe
ggtccggagcagacgc

SEQ ID NO: 36752 - DNA, 16 bp, Artificial
  oligonucleotide probe
gtggcaggagcgacgc

SEQ ID NO: 36753 - DNA, 16 bp, Artificial
  oligonucleotide probe
gtggcaggagcgacgc

SEQ ID NO: 36754 - DNA, 16 bp, Artificial
  oligonucleotide probe
gtggcggaggtcggaa

SEQ ID NO: 36755 - DNA, 16 bp, Artificial
  oligonucleotide probe
gtggcggaggtcggaa

SEQ ID NO: 36756 - DNA, 16 bp, Artificial
  oligonucleotide probe
cctccgaggacgcgga

SEQ ID NO: 36757 - DNA, 16 bp, Artificial
  oligonucleotide probe
cctccgaggacgcgga

SEQ ID NO: 36758 - DNA, 16 bp, Artificial
  oligonucleotide probe
tggcgggtgacggtgg

SEQ ID NO: 36759 - DNA, 16 bp, Artificial
  oligonucleotide probe
tggcgggtgacggtgg

SEQ ID NO: 36760 - DNA, 16 bp, Artificial
  oligonucleotide probe
gacggacgacgcgtgg

SEQ ID NO: 36761 - DNA, 16 bp, Artificial
  oligonucleotide probe
gacggacgacgcgtgg

SEQ ID NO: 36762 - DNA, 16 bp, Artificial
  oligonucleotide probe
gcctgggtcaccacgc

SEQ ID NO: 36763 - DNA, 16 bp, Artificial
  oligonucleotide probe
gcctgggtcaccacgc

SEQ ID NO: 36764 - DNA, 16 bp, Artificial
  oligonucleotide probe
tggcgggtgacggtgg

SEQ ID NO: 36765 - DNA, 16 bp, Artificial
  oligonucleotide probe
tggcgggtgacggtgg

SEQ ID NO: 36766 - DNA, 16 bp, Artificial
  oligonucleotide probe
agcgccaatcacgggt

SEQ ID NO: 36767 - DNA, 16 bp, Artificial
  oligonucleotide probe
agcgccaatcacgggt

SEQ ID NO: 36768 - DNA, 16 bp, Artificial
  oligonucleotide probe
accatggcacgcgacg

SEQ ID NO: 36769 - DNA, 16 bp, Artificial
  oligonucleotide probe
accatggcacgcgacg

SEQ ID NO: 36770 - DNA, 16 bp, Artificial
  oligonucleotide probe
gcgagtggcagggcct

SEQ ID NO: 36771 - DNA, 16 bp, Artificial
  oligonucleotide probe
gcgagtggcagggcct

SEQ ID NO: 36772 - DNA, 16 bp, Artificial
  oligonucleotide probe
caggggaagggtcgga

SEQ ID NO: 36773 - DNA, 16 bp, Artificial
  oligonucleotide probe
caggggaagggtcgga

SEQ ID NO: 36774 - DNA, 16 bp, Artificial
  oligonucleotide probe
gacggacgacgcgtgg

SEQ ID NO: 36775 - DNA, 16 bp, Artificial
  oligonucleotide probe
gacggacgacgcgtgg

SEQ ID NO: 36776 - DNA, 16 bp, Artificial
  oligonucleotide probe
tggcacgcgagccagg

SEQ ID NO: 36777 - DNA, 16 bp, Artificial
  oligonucleotide probe
tggcacgcgagccagg

SEQ ID NO: 36778 - DNA, 16 bp, Artificial
  oligonucleotide probe
gcaggtggtggcgagc

SEQ ID NO: 36779 - DNA, 16 bp, Artificial
  oligonucleotide probe
gcaggtggtggcgagc

SEQ ID NO: 36780 - DNA, 16 bp, Artificial
  oligonucleotide probe
caccgggtggtcagcg

SEQ ID NO: 36781 - DNA, 16 bp, Artificial
  oligonucleotide probe
caccgggtggtcagcg

SEQ ID NO: 36782 - DNA, 16 bp, Artificial
  oligonucleotide probe
caggagcgggaagcga

SEQ ID NO: 36783 - DNA, 16 bp, Artificial
  oligonucleotide probe
caggagcgggaagcga

SEQ ID NO: 36784 - DNA, 16 bp, Artificial
  oligonucleotide probe
tggcgtgggggtccaa

SEQ ID NO: 36785 - DNA, 16 bp, Artificial
  oligonucleotide probe
tggcgtgggggtccaa

SEQ ID NO: 36786 - DNA, 16 bp, Artificial
  oligonucleotide probe
ggaaagcggcctggaa

SEQ ID NO: 36787 - DNA, 16 bp, Artificial
  oligonucleotide probe
ggaaagcggcctggaa

SEQ ID NO: 36788 - DNA, 16 bp, Artificial
  oligonucleotide probe
gagcgcctcctcgagc

SEQ ID NO: 36789 - DNA, 16 bp, Artificial
  oligonucleotide probe
gagcgcctcctcgagc

SEQ ID NO: 36790 - DNA, 16 bp, Artificial
  oligonucleotide probe
gcctgtgggtccgcga

SEQ ID NO: 36791 - DNA, 16 bp, Artificial
  oligonucleotide probe
gcctgtgggtccgcga

SEQ ID NO: 36792 - DNA, 16 bp, Artificial
  oligonucleotide probe
acgcgagcgggtgcag

SEQ ID NO: 36793 - DNA, 16 bp, Artificial
  oligonucleotide probe
acgcgagcgggtgcag

SEQ ID NO: 36794 - DNA, 16 bp, Artificial
  oligonucleotide probe
ggaaagcggcctggaa

SEQ ID NO: 36795 - DNA, 16 bp, Artificial
  oligonucleotide probe
ggaaagcggcctggaa

SEQ ID NO: 36796 - DNA, 16 bp, Artificial
  oligonucleotide probe
gcgacgagcgagccaa

SEQ ID NO: 36797 - DNA, 16 bp, Artificial
  oligonucleotide probe
gcgacgagcgagccaa

SEQ ID NO: 36798 - DNA, 16 bp, Artificial
  oligonucleotide probe
caccgcgaggtcacgc

SEQ ID NO: 36799 - DNA, 16 bp, Artificial
  oligonucleotide probe
caccgcgaggtcacgc

SEQ ID NO: 36800 - DNA, 16 bp, Artificial
  oligonucleotide probe
tggcacgcgagccagg

SEQ ID NO: 36801 - DNA, 16 bp, Artificial
  oligonucleotide probe
tggcacgcgagccagg

SEQ ID NO: 36802 - DNA, 16 bp, Artificial
  oligonucleotide probe
gcgagtggcagggcct

SEQ ID NO: 36803 - DNA, 16 bp, Artificial
  oligonucleotide probe
gcgagtggcagggcct

SEQ ID NO: 36804 - DNA, 16 bp, Artificial
  oligonucleotide probe
gcagcctctggccgag

SEQ ID NO: 36805 - DNA, 16 bp, Artificial
  oligonucleotide probe
gcagcctctggccgag

SEQ ID NO: 36806 - DNA, 16 bp, Artificial
  oligonucleotide probe
tggcggtcgcctcgag

SEQ ID NO: 36807 - DNA, 16 bp, Artificial
  oligonucleotide probe
tggcggtcgcctcgag

SEQ ID NO: 36808 - DNA, 16 bp, Artificial
  oligonucleotide probe
gcgagtggcagggcct

SEQ ID NO: 36809 - DNA, 16 bp, Artificial
  oligonucleotide probe
gcgagtggcagggcct

SEQ ID NO: 36810 - DNA, 16 bp, Artificial
  oligonucleotide probe
tggcacgcgagccagg

SEQ ID NO: 36811 - DNA, 16 bp, Artificial
  oligonucleotide probe
tggcacgcgagccagg

SEQ ID NO: 36812 - DNA, 16 bp, Artificial
  oligonucleotide probe
gcgaagcggcgaggtc

SEQ ID NO: 36813 - DNA, 16 bp, Artificial
  oligonucleotide probe
gcgaagcggcgaggtc

SEQ ID NO: 36814 - DNA, 16 bp, Artificial
  oligonucleotide probe
ggaaagcggcctggaa

SEQ ID NO: 36815 - DNA, 16 bp, Artificial
  oligonucleotide probe
ggaaagcggcctggaa

SEQ ID NO: 36816 - DNA, 16 bp, Artificial
  oligonucleotide probe
cctccgaggacgcgga

SEQ ID NO: 36817 - DNA, 16 bp, Artificial
  oligonucleotide probe
tggcgggtgacggtgg

SEQ ID NO: 36818 - DNA, 16 bp, Artificial
  oligonucleotide probe
accacggaagcgcgga

SEQ ID NO: 36819 - DNA, 16 bp, Artificial
  oligonucleotide probe
caggagcgggaagcga

SEQ ID NO: 36820 - DNA, 16 bp, Artificial
  oligonucleotide probe
ggtccggagcagacgc

SEQ ID NO: 36821 - DNA, 16 bp, Artificial
  oligonucleotide probe
ggaaagcggcctggaa

SEQ ID NO: 36822 - DNA, 16 bp, Artificial
  oligonucleotide probe
gagcgcctcctcgagc

SEQ ID NO: 36823 - DNA, 16 bp, Artificial
  oligonucleotide probe
gacggacgacgcgtgg

SEQ ID NO: 36824 - DNA, 16 bp, Artificial
  oligonucleotide probe
tggcacgcgagccagg

SEQ ID NO: 36825 - DNA, 16 bp, Artificial
  oligonucleotide probe
gcgagtggcagggcct

SEQ ID NO: 36826 - DNA, 16 bp, Artificial
  oligonucleotide probe
accacggaagcgcgga

SEQ ID NO: 36827 - DNA, 16 bp, Artificial
  oligonucleotide probe
accacggaagcgcgga

SEQ ID NO: 36828 - DNA, 16 bp, Artificial
  oligonucleotide probe
cctccgaggacgcgga

SEQ ID NO: 36829 - DNA, 16 bp, Artificial
  oligonucleotide probe
cctccgaggacgcgga

SEQ ID NO: 36830 - DNA, 16 bp, Artificial
  oligonucleotide probe
gcagcctctggccgag

SEQ ID NO: 36831 - DNA, 16 bp, Artificial
  oligonucleotide probe
gcagcctctggccgag

SEQ ID NO: 36832 - DNA, 16 bp, Artificial
  oligonucleotide probe
caccgcgaggtcacgc

SEQ ID NO: 36833 - DNA, 16 bp, Artificial
  oligonucleotide probe
caccgcgaggtcacgc

SEQ ID NO: 36834 - DNA, 16 bp, Artificial
  oligonucleotide probe
tggcgtgggggtccaa

SEQ ID NO: 36835 - DNA, 16 bp, Artificial
  oligonucleotide probe
tggcgtgggggtccaa

SEQ ID NO: 36836 - DNA, 16 bp, Artificial
  oligonucleotide probe
tggcggtcgcctcgag

SEQ ID NO: 36837 - DNA, 16 bp, Artificial
  oligonucleotide probe
tggcggtcgcctcgag

SEQ ID NO: 36838 - DNA, 16 bp, Artificial
  oligonucleotide probe
acgcgagcgggtgcag

SEQ ID NO: 36839 - DNA, 16 bp, Artificial
  oligonucleotide probe
acgcgagcgggtgcag

SEQ ID NO: 36840 - DNA, 16 bp, Artificial
  oligonucleotide probe
caccgacgggaaacgc

SEQ ID NO: 36841 - DNA, 16 bp, Artificial
  oligonucleotide probe
caccgacgggaaacgc

SEQ ID NO: 36842 - DNA, 16 bp, Artificial
  oligonucleotide probe
ggtccggagcagacgc

SEQ ID NO: 36843 - DNA, 16 bp, Artificial
  oligonucleotide probe
ggtccggagcagacgc

SEQ ID NO: 36844 - DNA, 16 bp, Artificial
  oligonucleotide probe
gacgcaggcggagggt

SEQ ID NO: 36845 - DNA, 16 bp, Artificial
  oligonucleotide probe
gacgcaggcggagggt

SEQ ID NO: 36846 - DNA, 16 bp, Artificial
  oligonucleotide probe
tggcggtcgcctcgag

SEQ ID NO: 36847 - DNA, 16 bp, Artificial
  oligonucleotide probe
tggcggtcgcctcgag

SEQ ID NO: 36848 - DNA, 16 bp, Artificial
  oligonucleotide probe
accatggcacgcgacg

SEQ ID NO: 36849 - DNA, 16 bp, Artificial
  oligonucleotide probe
accatggcacgcgacg

SEQ ID NO: 36850 - DNA, 16 bp, Artificial
  oligonucleotide probe
acgcaccagtcccgga

SEQ ID NO: 36851 - DNA, 16 bp, Artificial
  oligonucleotide probe
acgcaccagtcccgga

SEQ ID NO: 36852 - DNA, 16 bp, Artificial
  oligonucleotide probe
gagcgcgacacccagg

SEQ ID NO: 36853 - DNA, 16 bp, Artificial
  oligonucleotide probe
gagcgcgacacccagg

SEQ ID NO: 36854 - DNA, 16 bp, Artificial
  oligonucleotide probe
caccgacgggaaacgc

SEQ ID NO: 36855 - DNA, 16 bp, Artificial
  oligonucleotide probe
caccgacgggaaacgc

SEQ ID NO: 36856 - DNA, 16 bp, Artificial
  oligonucleotide probe
gacggacgacgcgtgg

SEQ ID NO: 36857 - DNA, 16 bp, Artificial
  oligonucleotide probe
gacggacgacgcgtgg

SEQ ID NO: 36858 - DNA, 16 bp, Artificial
  oligonucleotide probe
gcctgtgggtccgcga

SEQ ID NO: 36859 - DNA, 16 bp, Artificial
  oligonucleotide probe
gcctgtgggtccgcga

SEQ ID NO: 36860 - DNA, 16 bp, Artificial
  oligonucleotide probe
gcgacgagcgagccaa

SEQ ID NO: 36861 - DNA, 16 bp, Artificial
  oligonucleotide probe
gcgacgagcgagccaa

SEQ ID NO: 36862 - DNA, 16 bp, Artificial
  oligonucleotide probe
gcaggtggtggcgagc

SEQ ID NO: 36863 - DNA, 16 bp, Artificial
  oligonucleotide probe
gcaggtggtggcgagc

SEQ ID NO: 36864 - DNA, 16 bp, Artificial
  oligonucleotide probe
agcgccaatcacgggt

SEQ ID NO: 36865 - DNA, 16 bp, Artificial
  oligonucleotide probe
agcgccaatcacgggt

SEQ ID NO: 36866 - DNA, 16 bp, Artificial
  oligonucleotide probe
caggggaagggtcgga

SEQ ID NO: 36867 - DNA, 16 bp, Artificial
  oligonucleotide probe
caggggaagggtcgga

SEQ ID NO: 36868 - DNA, 16 bp, Artificial
  oligonucleotide probe
caccgacgggaaacgc

SEQ ID NO: 36869 - DNA, 16 bp, Artificial
  oligonucleotide probe
caccgacgggaaacgc

SEQ ID NO: 36870 - DNA, 16 bp, Artificial
  oligonucleotide probe
agcggtccgcgagagc

SEQ ID NO: 36871 - DNA, 16 bp, Artificial
  oligonucleotide probe
agcggtccgcgagagc

SEQ ID NO: 36872 - DNA, 16 bp, Artificial
  oligonucleotide probe
gtccacgctggcgacg

SEQ ID NO: 36873 - DNA, 16 bp, Artificial
  oligonucleotide probe
gtccacgctggcgacg

SEQ ID NO: 36874 - DNA, 16 bp, Artificial
  oligonucleotide probe
tggcgggtgacggtgg

SEQ ID NO: 36875 - DNA, 16 bp, Artificial
  oligonucleotide probe
tggcgggtgacggtgg

SEQ ID NO: 36876 - DNA, 16 bp, Artificial
  oligonucleotide probe
caggagcgggaagcga

SEQ ID NO: 36877 - DNA, 16 bp, Artificial
  oligonucleotide probe
caggagcgggaagcga

SEQ ID NO: 36878 - DNA, 16 bp, Artificial
  oligonucleotide probe
gcctgggtcaccacgc

SEQ ID NO: 36879 - DNA, 16 bp, Artificial
  oligonucleotide probe
gcctgggtcaccacgc

SEQ ID NO: 36880 - DNA, 16 bp, Artificial
  oligonucleotide probe
gcctcaggacgcacgc

SEQ ID NO: 36881 - DNA, 16 bp, Artificial
  oligonucleotide probe
gcctcaggacgcacgc

SEQ ID NO: 36882 - DNA, 16 bp, Artificial
  oligonucleotide probe
gagcgcgacacccagg

SEQ ID NO: 36883 - DNA, 16 bp, Artificial
  oligonucleotide probe
gagcgcgacacccagg

SEQ ID NO: 36884 - DNA, 16 bp, Artificial
  oligonucleotide probe
tggcggtcgcctcgag

SEQ ID NO: 36885 - DNA, 16 bp, Artificial
  oligonucleotide probe
tggcggtcgcctcgag

SEQ ID NO: 36886 - DNA, 16 bp, Artificial
  oligonucleotide probe
acgcaccagtcccgga

SEQ ID NO: 36887 - DNA, 16 bp, Artificial
  oligonucleotide probe
acgcaccagtcccgga

SEQ ID NO: 36888 - DNA, 16 bp, Artificial
  oligonucleotide probe
gcctcggagacggcag

SEQ ID NO: 36889 - DNA, 16 bp, Artificial
  oligonucleotide probe
gcctcggagacggcag

SEQ ID NO: 36890 - DNA, 16 bp, Artificial
  oligonucleotide probe
gacggcgagtgggcag

SEQ ID NO: 36891 - DNA, 16 bp, Artificial
  oligonucleotide probe
gacggcgagtgggcag

SEQ ID NO: 36892 - DNA, 16 bp, Artificial
  oligonucleotide probe
gcaggcagccaatggc

SEQ ID NO: 36893 - DNA, 16 bp, Artificial
  oligonucleotide probe
gcaggcagccaatggc

SEQ ID NO: 36894 - DNA, 16 bp, Artificial
  oligonucleotide probe
accatggcacgcgacg

SEQ ID NO: 36895 - DNA, 16 bp, Artificial
  oligonucleotide probe
accatggcacgcgacg

SEQ ID NO: 36896 - DNA, 16 bp, Artificial
  oligonucleotide probe
caggagcgggaagcga

SEQ ID NO: 36897 - DNA, 16 bp, Artificial
  oligonucleotide probe
caggagcgggaagcga

SEQ ID NO: 36898 - DNA, 16 bp, Artificial
  oligonucleotide probe
gcctgtgggtccgcga

SEQ ID NO: 36899 - DNA, 16 bp, Artificial
  oligonucleotide probe
gcctgtgggtccgcga

SEQ ID NO: 36900 - DNA, 16 bp, Artificial
  oligonucleotide probe
tggcggtcgcctcgag

SEQ ID NO: 36901 - DNA, 16 bp, Artificial
  oligonucleotide probe
tggcggtcgcctcgag

SEQ ID NO: 36902 - DNA, 16 bp, Artificial
  oligonucleotide probe
agcgccaatcacgggt

SEQ ID NO: 36903 - DNA, 16 bp, Artificial
  oligonucleotide probe
agcgccaatcacgggt

SEQ ID NO: 36904 - DNA, 16 bp, Artificial
  oligonucleotide probe
tggcgtgggggtccaa

SEQ ID NO: 36905 - DNA, 16 bp, Artificial
  oligonucleotide probe
tggcgtgggggtccaa

SEQ ID NO: 36906 - DNA, 16 bp, Artificial
  oligonucleotide probe
gcaggtggtggcgagc

SEQ ID NO: 36907 - DNA, 16 bp, Artificial
  oligonucleotide probe
gcaggtggtggcgagc

SEQ ID NO: 36908 - DNA, 16 bp, Artificial
  oligonucleotide probe
cgagcggaggtcccaa

SEQ ID NO: 36909 - DNA, 16 bp, Artificial
  oligonucleotide probe
cgagcggaggtcccaa

SEQ ID NO: 36910 - DNA, 16 bp, Artificial
  oligonucleotide probe
gcaggtggtggcgagc

SEQ ID NO: 36911 - DNA, 16 bp, Artificial
  oligonucleotide probe
gcaggtggtggcgagc

SEQ ID NO: 36912 - DNA, 16 bp, Artificial
  oligonucleotide probe
caccgacgggaaacgc

SEQ ID NO: 36913 - DNA, 16 bp, Artificial
  oligonucleotide probe
caccgacgggaaacgc

SEQ ID NO: 36914 - DNA, 16 bp, Artificial
  oligonucleotide probe
gcctcggagacggcag

SEQ ID NO: 36915 - DNA, 16 bp, Artificial
  oligonucleotide probe
gcctcggagacggcag

SEQ ID NO: 36916 - DNA, 16 bp, Artificial
  oligonucleotide probe
gacggcgagtgggcag

SEQ ID NO: 36917 - DNA, 16 bp, Artificial
  oligonucleotide probe
gacggcgagtgggcag

SEQ ID NO: 36918 - DNA, 16 bp, Artificial
  oligonucleotide probe
caggggaagggtcgga

SEQ ID NO: 36919 - DNA, 16 bp, Artificial
  oligonucleotide probe
caggggaagggtcgga

SEQ ID NO: 36920 - DNA, 16 bp, Artificial
  oligonucleotide probe
caccgacgggaaacgc

SEQ ID NO: 36921 - DNA, 16 bp, Artificial
  oligonucleotide probe
caccgacgggaaacgc

SEQ ID NO: 36922 - DNA, 16 bp, Artificial
  oligonucleotide probe
gacgcaggcggagggt

SEQ ID NO: 36923 - DNA, 16 bp, Artificial
  oligonucleotide probe
gacgcaggcggagggt

SEQ ID NO: 36924 - DNA, 16 bp, Artificial
  oligonucleotide probe
caccgggtggtcagcg

SEQ ID NO: 36925 - DNA, 16 bp, Artificial
  oligonucleotide probe
caccgggtggtcagcg

SEQ ID NO: 36926 - DNA, 16 bp, Artificial
  oligonucleotide probe
gtggcggaggtcggaa

SEQ ID NO: 36927 - DNA, 16 bp, Artificial
  oligonucleotide probe
gtggcggaggtcggaa

SEQ ID NO: 36928 - DNA, 16 bp, Artificial
  oligonucleotide probe
gcagcctctggccgag

SEQ ID NO: 36929 - DNA, 16 bp, Artificial
  oligonucleotide probe
gcagcctctggccgag

SEQ ID NO: 36930 - DNA, 16 bp, Artificial
  oligonucleotide probe
gacgcaggcggagggt

SEQ ID NO: 36931 - DNA, 16 bp, Artificial
  oligonucleotide probe
gacgcaggcggagggt

SEQ ID NO: 36932 - DNA, 16 bp, Artificial
  oligonucleotide probe
tgctcggatgctgcga

SEQ ID NO: 36933 - DNA, 16 bp, Artificial
  oligonucleotide probe
tgctcggatgctgcga

SEQ ID NO: 36934 - DNA, 16 bp, Artificial
  oligonucleotide probe
gcgaagcggcgaggtc

SEQ ID NO: 36935 - DNA, 16 bp, Artificial
  oligonucleotide probe
gcgaagcggcgaggtc

SEQ ID NO: 36936 - DNA, 16 bp, Artificial
  oligonucleotide probe
caccgggtggtcagcg

SEQ ID NO: 36937 - DNA, 16 bp, Artificial
  oligonucleotide probe
caccgggtggtcagcg

SEQ ID NO: 36938 - DNA, 16 bp, Artificial
  oligonucleotide probe
gcaggtggtggcgagc

SEQ ID NO: 36939 - DNA, 16 bp, Artificial
  oligonucleotide probe
gcaggtggtggcgagc

SEQ ID NO: 36940 - DNA, 16 bp, Artificial
  oligonucleotide probe
gcgacgagcgagccaa

SEQ ID NO: 36941 - DNA, 16 bp, Artificial
  oligonucleotide probe
gcgacgagcgagccaa

SEQ ID NO: 36942 - DNA, 16 bp, Artificial
  oligonucleotide probe
gcaggcagccaatggc

SEQ ID NO: 36943 - DNA, 16 bp, Artificial
  oligonucleotide probe
gcaggcagccaatggc

SEQ ID NO: 36944 - DNA, 16 bp, Artificial
  oligonucleotide probe
cctccgaggacgcgga

SEQ ID NO: 36945 - DNA, 16 bp, Artificial
  oligonucleotide probe
cctccgaggacgcgga

SEQ ID NO: 36946 - DNA, 16 bp, Artificial
  oligonucleotide probe
tggcacgcgagccagg

SEQ ID NO: 36947 - DNA, 16 bp, Artificial
  oligonucleotide probe
tggcacgcgagccagg

SEQ ID NO: 36948 - DNA, 16 bp, Artificial
  oligonucleotide probe
gacgcaggcggagggt

SEQ ID NO: 36949 - DNA, 16 bp, Artificial
  oligonucleotide probe
gacgcaggcggagggt

SEQ ID NO: 36950 - DNA, 16 bp, Artificial
  oligonucleotide probe
caccgcgaggtcacgc

SEQ ID NO: 36951 - DNA, 16 bp, Artificial
  oligonucleotide probe
caccgcgaggtcacgc

SEQ ID NO: 36952 - DNA, 16 bp, Artificial
  oligonucleotide probe
gacggcgagtgggcag

SEQ ID NO: 36953 - DNA, 16 bp, Artificial
  oligonucleotide probe
gacggcgagtgggcag

SEQ ID NO: 36954 - DNA, 16 bp, Artificial
  oligonucleotide probe
gagcgcgacacccagg

SEQ ID NO: 36955 - DNA, 16 bp, Artificial
  oligonucleotide probe
gagcgcgacacccagg

SEQ ID NO: 36956 - DNA, 16 bp, Artificial
  oligonucleotide probe
gcctgtgggtccgcga

SEQ ID NO: 36957 - DNA, 16 bp, Artificial
  oligonucleotide probe
gcctgtgggtccgcga

SEQ ID NO: 36958 - DNA, 16 bp, Artificial
  oligonucleotide probe
tggcacgcgagccagg

SEQ ID NO: 36959 - DNA, 16 bp, Artificial
  oligonucleotide probe
tggcacgcgagccagg

SEQ ID NO: 36960 - DNA, 16 bp, Artificial
  oligonucleotide probe
gggtacgcgacgcgag

SEQ ID NO: 36961 - DNA, 16 bp, Artificial
  oligonucleotide probe
gggtacgcgacgcgag

SEQ ID NO: 36962 - DNA, 16 bp, Artificial
  oligonucleotide probe
gcctgtgggtccgcga

SEQ ID NO: 36963 - DNA, 16 bp, Artificial
  oligonucleotide probe
gcctgtgggtccgcga

SEQ ID NO: 36964 - DNA, 16 bp, Artificial
  oligonucleotide probe
ggaaagcggcctggaa

SEQ ID NO: 36965 - DNA, 16 bp, Artificial
  oligonucleotide probe
ggaaagcggcctggaa

SEQ ID NO: 36966 - DNA, 16 bp, Artificial
  oligonucleotide probe
gcctagcgcctcgacg

SEQ ID NO: 36967 - DNA, 16 bp, Artificial
  oligonucleotide probe
gcctagcgcctcgacg

SEQ ID NO: 36968 - DNA, 16 bp, Artificial
  oligonucleotide probe
caggcctccctcgcga

SEQ ID NO: 36969 - DNA, 16 bp, Artificial
  oligonucleotide probe
caggcctccctcgcga

SEQ ID NO: 36970 - DNA, 16 bp, Artificial
  oligonucleotide probe
acgcaccagtcccgga

SEQ ID NO: 36971 - DNA, 16 bp, Artificial
  oligonucleotide probe
acgcaccagtcccgga

SEQ ID NO: 36972 - DNA, 16 bp, Artificial
  oligonucleotide probe
agcgccaatcacgggt

SEQ ID NO: 36973 - DNA, 16 bp, Artificial
  oligonucleotide probe
agcgccaatcacgggt

SEQ ID NO: 36974 - DNA, 16 bp, Artificial
  oligonucleotide probe
caccgggtggtcagcg

SEQ ID NO: 36975 - DNA, 16 bp, Artificial
  oligonucleotide probe
caccgggtggtcagcg

SEQ ID NO: 36976 - DNA, 16 bp, Artificial
  oligonucleotide probe
agcggtccgcgagagc

SEQ ID NO: 36977 - DNA, 16 bp, Artificial
  oligonucleotide probe
agcggtccgcgagagc

SEQ ID NO: 36978 - DNA, 16 bp, Artificial
  oligonucleotide probe
gcgacgagcgagccaa

SEQ ID NO: 36979 - DNA, 16 bp, Artificial
  oligonucleotide probe
gcgacgagcgagccaa

SEQ ID NO: 36980 - DNA, 16 bp, Artificial
  oligonucleotide probe
caggagcgggaagcga

SEQ ID NO: 36981 - DNA, 16 bp, Artificial
  oligonucleotide probe
caggagcgggaagcga

SEQ ID NO: 36982 - DNA, 16 bp, Artificial
  oligonucleotide probe
tggcgggtgacggtgg

SEQ ID NO: 36983 - DNA, 16 bp, Artificial
  oligonucleotide probe
tggcgggtgacggtgg

SEQ ID NO: 36984 - DNA, 16 bp, Artificial
  oligonucleotide probe
gcagcctctggccgag

SEQ ID NO: 36985 - DNA, 16 bp, Artificial
  oligonucleotide probe
gcagcctctggccgag

SEQ ID NO: 36986 - DNA, 16 bp, Artificial
  oligonucleotide probe
gacggacgacgcgtgg

SEQ ID NO: 36987 - DNA, 16 bp, Artificial
  oligonucleotide probe
gacggacgacgcgtgg

SEQ ID NO: 36988 - DNA, 16 bp, Artificial
  oligonucleotide probe
gtggcaggagcgacgc

SEQ ID NO: 36989 - DNA, 16 bp, Artificial
  oligonucleotide probe
gtggcaggagcgacgc

SEQ ID NO: 36990 - DNA, 16 bp, Artificial
  oligonucleotide probe
accatggcacgcgacg

SEQ ID NO: 36991 - DNA, 16 bp, Artificial
  oligonucleotide probe
accatggcacgcgacg

SEQ ID NO: 36992 - DNA, 16 bp, Artificial
  oligonucleotide probe
gtggcaggagcgacgc

SEQ ID NO: 36993 - DNA, 16 bp, Artificial
  oligonucleotide probe
gtggcaggagcgacgc

SEQ ID NO: 36994 - DNA, 16 bp, Artificial
  oligonucleotide probe
caggggaagggtcgga

SEQ ID NO: 36995 - DNA, 16 bp, Artificial
  oligonucleotide probe
caggggaagggtcgga

SEQ ID NO: 36996 - DNA, 16 bp, Artificial
  oligonucleotide probe
gcctagcgcctcgacg

SEQ ID NO: 36997 - DNA, 16 bp, Artificial
  oligonucleotide probe
gcctagcgcctcgacg

SEQ ID NO: 36998 - DNA, 16 bp, Artificial
  oligonucleotide probe
gacggcgagtgggcag

SEQ ID NO: 36999 - DNA, 16 bp, Artificial
  oligonucleotide probe
gacggcgagtgggcag

SEQ ID NO: 37000 - DNA, 16 bp, Artificial
  oligonucleotide probe
gcaggcagccaatggc

SEQ ID NO: 37001 - DNA, 16 bp, Artificial
  oligonucleotide probe
gcaggcagccaatggc

SEQ ID NO: 37002 - DNA, 16 bp, Artificial
  oligonucleotide probe
gtggcggaggtcggaa

SEQ ID NO: 37003 - DNA, 16 bp, Artificial
  oligonucleotide probe
gtggcggaggtcggaa

SEQ ID NO: 37004 - DNA, 16 bp, Artificial
  oligonucleotide probe
gacgcaggcggagggt

SEQ ID NO: 37005 - DNA, 16 bp, Artificial
  oligonucleotide probe
gacgcaggcggagggt

SEQ ID NO: 37006 - DNA, 16 bp, Artificial
  oligonucleotide probe
caccgcgaggtcacgc

SEQ ID NO: 37007 - DNA, 16 bp, Artificial
  oligonucleotide probe
caccgcgaggtcacgc

SEQ ID NO: 37008 - DNA, 16 bp, Artificial
  oligonucleotide probe
gacggcgagtgggcag

SEQ ID NO: 37009 - DNA, 16 bp, Artificial
  oligonucleotide probe
gacggcgagtgggcag

SEQ ID NO: 37010 - DNA, 16 bp, Artificial
  oligonucleotide probe
gacggcgagtgggcag

SEQ ID NO: 37011 - DNA, 16 bp, Artificial
  oligonucleotide probe
gacggcgagtgggcag

SEQ ID NO: 37012 - DNA, 16 bp, Artificial
  oligonucleotide probe
tggcggtcgcctcgag

SEQ ID NO: 37013 - DNA, 16 bp, Artificial
  oligonucleotide probe
tggcggtcgcctcgag

SEQ ID NO: 37014 - DNA, 16 bp, Artificial
  oligonucleotide probe
gcagcctctggccgag

SEQ ID NO: 37015 - DNA, 16 bp, Artificial
  oligonucleotide probe
gcagcctctggccgag

SEQ ID NO: 37016 - DNA, 16 bp, Artificial
  oligonucleotide probe
acgcgagcgggtgcag

SEQ ID NO: 37017 - DNA, 16 bp, Artificial
  oligonucleotide probe
acgcgagcgggtgcag

SEQ ID NO: 37018 - DNA, 16 bp, Artificial
  oligonucleotide probe
cctccgaggacgcgga

SEQ ID NO: 37019 - DNA, 16 bp, Artificial
  oligonucleotide probe
cctccgaggacgcgga

SEQ ID NO: 37020 - DNA, 16 bp, Artificial
  oligonucleotide probe
gcgagtggcagggcct

SEQ ID NO: 37021 - DNA, 16 bp, Artificial
  oligonucleotide probe
gcgagtggcagggcct

SEQ ID NO: 37022 - DNA, 16 bp, Artificial
  oligonucleotide probe
caccgcgaggtcacgc

SEQ ID NO: 37023 - DNA, 16 bp, Artificial
  oligonucleotide probe
caccgcgaggtcacgc

SEQ ID NO: 37024 - DNA, 16 bp, Artificial
  oligonucleotide probe
gtgggggtgcagggaa

SEQ ID NO: 37025 - DNA, 16 bp, Artificial
  oligonucleotide probe
gtgggggtgcagggaa

SEQ ID NO: 37026 - DNA, 16 bp, Artificial
  oligonucleotide probe
gcctagcgcctcgacg

SEQ ID NO: 37027 - DNA, 16 bp, Artificial
  oligonucleotide probe
gcctagcgcctcgacg

SEQ ID NO: 37028 - DNA, 16 bp, Artificial
  oligonucleotide probe
gagcgcctcctcgagc

SEQ ID NO: 37029 - DNA, 16 bp, Artificial
  oligonucleotide probe
gagcgcctcctcgagc

SEQ ID NO: 37030 - DNA, 16 bp, Artificial
  oligonucleotide probe
caccgggtggtcagcg

SEQ ID NO: 37031 - DNA, 16 bp, Artificial
  oligonucleotide probe
caccgggtggtcagcg

SEQ ID NO: 37032 - DNA, 16 bp, Artificial
  oligonucleotide probe
gcgacgagcgagccaa

SEQ ID NO: 37033 - DNA, 16 bp, Artificial
  oligonucleotide probe
gcgacgagcgagccaa

SEQ ID NO: 37034 - DNA, 16 bp, Artificial
  oligonucleotide probe
gtggcggaggtcggaa

SEQ ID NO: 37035 - DNA, 16 bp, Artificial
  oligonucleotide probe
gtggcggaggtcggaa

SEQ ID NO: 37036 - DNA, 16 bp, Artificial
  oligonucleotide probe
gacgcaggcggagggt

SEQ ID NO: 37037 - DNA, 16 bp, Artificial
  oligonucleotide probe
gacgcaggcggagggt

SEQ ID NO: 37038 - DNA, 16 bp, Artificial
  oligonucleotide probe
acgcgagcgggtgcag

SEQ ID NO: 37039 - DNA, 16 bp, Artificial
  oligonucleotide probe
acgcgagcgggtgcag

SEQ ID NO: 37040 - DNA, 16 bp, Artificial
  oligonucleotide probe
gtccacgctggcgacg

SEQ ID NO: 37041 - DNA, 16 bp, Artificial
  oligonucleotide probe
gtccacgctggcgacg

SEQ ID NO: 37042 - DNA, 16 bp, Artificial
  oligonucleotide probe
tggcgtgggggtccaa

SEQ ID NO: 37043 - DNA, 16 bp, Artificial
  oligonucleotide probe
tggcgtgggggtccaa

SEQ ID NO: 37044 - DNA, 16 bp, Artificial
  oligonucleotide probe
gcctcggagacggcag

SEQ ID NO: 37045 - DNA, 16 bp, Artificial
  oligonucleotide probe
gcctcggagacggcag

SEQ ID NO: 37046 - DNA, 16 bp, Artificial
  oligonucleotide probe
tggcgtgggggtccaa

SEQ ID NO: 37047 - DNA, 16 bp, Artificial
  oligonucleotide probe
tggcgtgggggtccaa

SEQ ID NO: 37048 - DNA, 16 bp, Artificial
  oligonucleotide probe
acgcaccagtcccgga

SEQ ID NO: 37049 - DNA, 16 bp, Artificial
  oligonucleotide probe
acgcaccagtcccgga

SEQ ID NO: 37050 - DNA, 16 bp, Artificial
  oligonucleotide probe
gcctagcgcctcgacg

SEQ ID NO: 37051 - DNA, 16 bp, Artificial
  oligonucleotide probe
gcctagcgcctcgacg

SEQ ID NO: 37052 - DNA, 16 bp, Artificial
  oligonucleotide probe
tggcgggtgacggtgg

SEQ ID NO: 37053 - DNA, 16 bp, Artificial
  oligonucleotide probe
tggcgggtgacggtgg

SEQ ID NO: 37054 - DNA, 16 bp, Artificial
  oligonucleotide probe
accatggcacgcgacg

SEQ ID NO: 37055 - DNA, 16 bp, Artificial
  oligonucleotide probe
accatggcacgcgacg

SEQ ID NO: 37056 - DNA, 16 bp, Artificial
  oligonucleotide probe
ggtccggagcagacgc

SEQ ID NO: 37057 - DNA, 16 bp, Artificial
  oligonucleotide probe
ggtccggagcagacgc

SEQ ID NO: 37058 - DNA, 16 bp, Artificial
  oligonucleotide probe
acgcgagcgggtgcag

SEQ ID NO: 37059 - DNA, 16 bp, Artificial
  oligonucleotide probe
acgcgagcgggtgcag

SEQ ID NO: 37060 - DNA, 16 bp, Artificial
  oligonucleotide probe
tggcgggtgacggtgg

SEQ ID NO: 37061 - DNA, 16 bp, Artificial
  oligonucleotide probe
tggcgggtgacggtgg

SEQ ID NO: 37062 - DNA, 16 bp, Artificial
  oligonucleotide probe
tggcgtgggggtccaa

SEQ ID NO: 37063 - DNA, 16 bp, Artificial
  oligonucleotide probe
tggcgtgggggtccaa

SEQ ID NO: 37064 - DNA, 16 bp, Artificial
  oligonucleotide probe
tggcgggtgacggtgg

SEQ ID NO: 37065 - DNA, 16 bp, Artificial
  oligonucleotide probe
tggcgggtgacggtgg

SEQ ID NO: 37066 - DNA, 16 bp, Artificial
  oligonucleotide probe
caggggaagggtcgga

SEQ ID NO: 37067 - DNA, 16 bp, Artificial
  oligonucleotide probe
caggggaagggtcgga

SEQ ID NO: 37068 - DNA, 16 bp, Artificial
  oligonucleotide probe
tggcgggtgacggtgg

SEQ ID NO: 37069 - DNA, 16 bp, Artificial
  oligonucleotide probe
tggcgggtgacggtgg

SEQ ID NO: 37070 - DNA, 16 bp, Artificial
  oligonucleotide probe
caggggaagggtcgga

SEQ ID NO: 37071 - DNA, 16 bp, Artificial
  oligonucleotide probe
caggggaagggtcgga

SEQ ID NO: 37072 - DNA, 16 bp, Artificial
  oligonucleotide probe
accacggaagcgcgga

SEQ ID NO: 37073 - DNA, 16 bp, Artificial
  oligonucleotide probe
accacggaagcgcgga

SEQ ID NO: 37074 - DNA, 16 bp, Artificial
  oligonucleotide probe
gagcgcgacacccagg

SEQ ID NO: 37075 - DNA, 16 bp, Artificial
  oligonucleotide probe
gagcgcgacacccagg

SEQ ID NO: 37076 - DNA, 16 bp, Artificial
  oligonucleotide probe
caggagcgggaagcga

SEQ ID NO: 37077 - DNA, 16 bp, Artificial
  oligonucleotide probe
caggagcgggaagcga

SEQ ID NO: 37078 - DNA, 16 bp, Artificial
  oligonucleotide probe
gcgaagcggcgaggtc

SEQ ID NO: 37079 - DNA, 16 bp, Artificial
  oligonucleotide probe
gcgaagcggcgaggtc

SEQ ID NO: 37080 - DNA, 16 bp, Artificial
  oligonucleotide probe
gcctcggagacggcag

SEQ ID NO: 37081 - DNA, 16 bp, Artificial
  oligonucleotide probe
gcctcggagacggcag

SEQ ID NO: 37082 - DNA, 16 bp, Artificial
  oligonucleotide probe
gacggacgacgcgtgg

SEQ ID NO: 37083 - DNA, 16 bp, Artificial
  oligonucleotide probe
gacggacgacgcgtgg

SEQ ID NO: 37084 - DNA, 16 bp, Artificial
  oligonucleotide probe
tggcgtgggggtccaa

SEQ ID NO: 37085 - DNA, 16 bp, Artificial
  oligonucleotide probe
tggcgtgggggtccaa

SEQ ID NO: 37086 - DNA, 16 bp, Artificial
  oligonucleotide probe
caccgggtggtcagcg

SEQ ID NO: 37087 - DNA, 16 bp, Artificial
  oligonucleotide probe
caccgggtggtcagcg

SEQ ID NO: 37088 - DNA, 16 bp, Artificial
  oligonucleotide probe
gcctcggagacggcag

SEQ ID NO: 37089 - DNA, 16 bp, Artificial
  oligonucleotide probe
gcctcggagacggcag

SEQ ID NO: 37090 - DNA, 16 bp, Artificial
  oligonucleotide probe
agcggtccgcgagagc

SEQ ID NO: 37091 - DNA, 16 bp, Artificial
  oligonucleotide probe
agcggtccgcgagagc

SEQ ID NO: 37092 - DNA, 16 bp, Artificial
  oligonucleotide probe
accacggaagcgcgga

SEQ ID NO: 37093 - DNA, 16 bp, Artificial
  oligonucleotide probe
accacggaagcgcgga

SEQ ID NO: 37094 - DNA, 16 bp, Artificial
  oligonucleotide probe
gtggcaggagcgacgc

SEQ ID NO: 37095 - DNA, 16 bp, Artificial
  oligonucleotide probe
gtggcaggagcgacgc

SEQ ID NO: 37096 - DNA, 16 bp, Artificial
  oligonucleotide probe
caccgacgggaaacgc

SEQ ID NO: 37097 - DNA, 16 bp, Artificial
  oligonucleotide probe
caccgacgggaaacgc

SEQ ID NO: 37098 - DNA, 16 bp, Artificial
  oligonucleotide probe
agcgcaccgacgacgc

SEQ ID NO: 37099 - DNA, 16 bp, Artificial
  oligonucleotide probe
agcgcaccgacgacgc

SEQ ID NO: 37100 - DNA, 16 bp, Artificial
  oligonucleotide probe
acgcgagcgggtgcag

SEQ ID NO: 37101 - DNA, 16 bp, Artificial
  oligonucleotide probe
acgcgagcgggtgcag

SEQ ID NO: 37102 - DNA, 16 bp, Artificial
  oligonucleotide probe
agcggtccgcgagagc

SEQ ID NO: 37103 - DNA, 16 bp, Artificial
  oligonucleotide probe
agcggtccgcgagagc

SEQ ID NO: 37104 - DNA, 16 bp, Artificial
  oligonucleotide probe
accacggaagcgcgga

SEQ ID NO: 37105 - DNA, 16 bp, Artificial
  oligonucleotide probe
accacggaagcgcgga

SEQ ID NO: 37106 - DNA, 16 bp, Artificial
  oligonucleotide probe
ggtccggagcagacgc

SEQ ID NO: 37107 - DNA, 16 bp, Artificial
  oligonucleotide probe
ggtccggagcagacgc

SEQ ID NO: 37108 - DNA, 16 bp, Artificial
  oligonucleotide probe
tggcgtgggggtccaa

SEQ ID NO: 37109 - DNA, 16 bp, Artificial
  oligonucleotide probe
tggcgtgggggtccaa

SEQ ID NO: 37110 - DNA, 16 bp, Artificial
  oligonucleotide probe
gcctgtgggtccgcga

SEQ ID NO: 37111 - DNA, 16 bp, Artificial
  oligonucleotide probe
gcctgtgggtccgcga

SEQ ID NO: 37112 - DNA, 16 bp, Artificial
  oligonucleotide probe
caggagcgggaagcga

SEQ ID NO: 37113 - DNA, 16 bp, Artificial
  oligonucleotide probe
caggagcgggaagcga

SEQ ID NO: 37114 - DNA, 16 bp, Artificial
  oligonucleotide probe
gcctgggtcaccacgc

SEQ ID NO: 37115 - DNA, 16 bp, Artificial
  oligonucleotide probe
gcctgggtcaccacgc

SEQ ID NO: 37116 - DNA, 16 bp, Artificial
  oligonucleotide probe
gcgaagcggcgaggtc

SEQ ID NO: 37117 - DNA, 16 bp, Artificial
  oligonucleotide probe
gcgaagcggcgaggtc

SEQ ID NO: 37118 - DNA, 16 bp, Artificial
  oligonucleotide probe
gacgcaggcggagggt

SEQ ID NO: 37119 - DNA, 16 bp, Artificial
  oligonucleotide probe
gacgcaggcggagggt

SEQ ID NO: 37120 - DNA, 16 bp, Artificial
  oligonucleotide probe
cctccgaggacgcgga

SEQ ID NO: 37121 - DNA, 16 bp, Artificial
  oligonucleotide probe
cctccgaggacgcgga

SEQ ID NO: 37122 - DNA, 16 bp, Artificial
  oligonucleotide probe
gacggacgacgcgtgg

SEQ ID NO: 37123 - DNA, 16 bp, Artificial
  oligonucleotide probe
gacggacgacgcgtgg

SEQ ID NO: 37124 - DNA, 16 bp, Artificial
  oligonucleotide probe
acgccaccgcctgacg

SEQ ID NO: 37125 - DNA, 16 bp, Artificial
  oligonucleotide probe
acgccaccgcctgacg

SEQ ID NO: 37126 - DNA, 16 bp, Artificial
  oligonucleotide probe
gacggcgagtgggcag

SEQ ID NO: 37127 - DNA, 16 bp, Artificial
  oligonucleotide probe
gacggcgagtgggcag

SEQ ID NO: 37128 - DNA, 16 bp, Artificial
  oligonucleotide probe
gcctcggagacggcag

SEQ ID NO: 37129 - DNA, 16 bp, Artificial
  oligonucleotide probe
gcctcggagacggcag

SEQ ID NO: 37130 - DNA, 16 bp, Artificial
  oligonucleotide probe
gcctcggagacggcag

SEQ ID NO: 37131 - DNA, 16 bp, Artificial
  oligonucleotide probe
gcctcggagacggcag

SEQ ID NO: 37132 - DNA, 16 bp, Artificial
  oligonucleotide probe
acgcgagcgggtgcag

SEQ ID NO: 37133 - DNA, 16 bp, Artificial
  oligonucleotide probe
acgcgagcgggtgcag

SEQ ID NO: 37134 - DNA, 16 bp, Artificial
  oligonucleotide probe
ggaaagcggcctggaa

SEQ ID NO: 37135 - DNA, 16 bp, Artificial
  oligonucleotide probe
ggaaagcggcctggaa

SEQ ID NO: 37136 - DNA, 16 bp, Artificial
  oligonucleotide probe
acgcaccagtcccgga

SEQ ID NO: 37137 - DNA, 16 bp, Artificial
  oligonucleotide probe
acgcaccagtcccgga

SEQ ID NO: 37138 - DNA, 16 bp, Artificial
  oligonucleotide probe
gacggacgacgcgtgg

SEQ ID NO: 37139 - DNA, 16 bp, Artificial
  oligonucleotide probe
gacggacgacgcgtgg

SEQ ID NO: 37140 - DNA, 16 bp, Artificial
  oligonucleotide probe
gacgcaggcggagggt

SEQ ID NO: 37141 - DNA, 16 bp, Artificial
  oligonucleotide probe
gacgcaggcggagggt

SEQ ID NO: 37142 - DNA, 16 bp, Artificial
  oligonucleotide probe
caggagcgggaagcga

SEQ ID NO: 37143 - DNA, 16 bp, Artificial
  oligonucleotide probe
caggagcgggaagcga

SEQ ID NO: 37144 - DNA, 16 bp, Artificial
  oligonucleotide probe
caccgggtggtcagcg

SEQ ID NO: 37145 - DNA, 16 bp, Artificial
  oligonucleotide probe
caccgggtggtcagcg

SEQ ID NO: 37146 - DNA, 16 bp, Artificial
  oligonucleotide probe
gtccacgctggcgacg

SEQ ID NO: 37147 - DNA, 16 bp, Artificial
  oligonucleotide probe
gtccacgctggcgacg

SEQ ID NO: 37148 - DNA, 16 bp, Artificial
  oligonucleotide probe
caggcctccctcgcga

SEQ ID NO: 37149 - DNA, 16 bp, Artificial
  oligonucleotide probe
caggcctccctcgcga

SEQ ID NO: 37150 - DNA, 16 bp, Artificial
  oligonucleotide probe
acgcaccagtcccgga

SEQ ID NO: 37151 - DNA, 16 bp, Artificial
  oligonucleotide probe
acgcaccagtcccgga

SEQ ID NO: 37152 - DNA, 16 bp, Artificial
  oligonucleotide probe
cagggcagggtcgggt

SEQ ID NO: 37153 - DNA, 16 bp, Artificial
  oligonucleotide probe
cagggcagggtcgggt

SEQ ID NO: 37154 - DNA, 16 bp, Artificial
  oligonucleotide probe
gcgagtggcagggcct

SEQ ID NO: 37155 - DNA, 16 bp, Artificial
  oligonucleotide probe
gcgagtggcagggcct

SEQ ID NO: 37156 - DNA, 16 bp, Artificial
  oligonucleotide probe
gcctgggtcaccacgc

SEQ ID NO: 37157 - DNA, 16 bp, Artificial
  oligonucleotide probe
gcctgggtcaccacgc

SEQ ID NO: 37158 - DNA, 16 bp, Artificial
  oligonucleotide probe
gcaggcagccaatggc

SEQ ID NO: 37159 - DNA, 16 bp, Artificial
  oligonucleotide probe
gcaggcagccaatggc

SEQ ID NO: 37160 - DNA, 16 bp, Artificial
  oligonucleotide probe
caccgcgaggtcacgc

SEQ ID NO: 37161 - DNA, 16 bp, Artificial
  oligonucleotide probe
caccgcgaggtcacgc

SEQ ID NO: 37162 - DNA, 16 bp, Artificial
  oligonucleotide probe
gagcgcgacacccagg

SEQ ID NO: 37163 - DNA, 16 bp, Artificial
  oligonucleotide probe
gagcgcgacacccagg

SEQ ID NO: 37164 - DNA, 16 bp, Artificial
  oligonucleotide probe
gtggcggaggtcggaa

SEQ ID NO: 37165 - DNA, 16 bp, Artificial
  oligonucleotide probe
gtggcggaggtcggaa

SEQ ID NO: 37166 - DNA, 16 bp, Artificial
  oligonucleotide probe
caggagcgggaagcga

SEQ ID NO: 37167 - DNA, 16 bp, Artificial
  oligonucleotide probe
caggagcgggaagcga

SEQ ID NO: 37168 - DNA, 16 bp, Artificial
  oligonucleotide probe
agcggtccgcgagagc

SEQ ID NO: 37169 - DNA, 16 bp, Artificial
  oligonucleotide probe
agcggtccgcgagagc

SEQ ID NO: 37170 - DNA, 16 bp, Artificial
  oligonucleotide probe
gcaggcagccaatggc

SEQ ID NO: 37171 - DNA, 16 bp, Artificial
  oligonucleotide probe
gcaggcagccaatggc

SEQ ID NO: 37172 - DNA, 16 bp, Artificial
  oligonucleotide probe
gtggcggaggtcggaa

SEQ ID NO: 37173 - DNA, 16 bp, Artificial
  oligonucleotide probe
gtggcggaggtcggaa

SEQ ID NO: 37174 - DNA, 16 bp, Artificial
  oligonucleotide probe
caggggaagggtcgga

SEQ ID NO: 37175 - DNA, 16 bp, Artificial
  oligonucleotide probe
caggggaagggtcgga

SEQ ID NO: 37176 - DNA, 16 bp, Artificial
  oligonucleotide probe
agcgccaatcacgggt

SEQ ID NO: 37177 - DNA, 16 bp, Artificial
  oligonucleotide probe
agcgccaatcacgggt

SEQ ID NO: 37178 - DNA, 16 bp, Artificial
  oligonucleotide probe
gcctgggtcaccacgc

SEQ ID NO: 37179 - DNA, 16 bp, Artificial
  oligonucleotide probe
gcctgggtcaccacgc

SEQ ID NO: 37180 - DNA, 16 bp, Artificial
  oligonucleotide probe
gacggcgagtgggcag

SEQ ID NO: 37181 - DNA, 16 bp, Artificial
  oligonucleotide probe
gacggcgagtgggcag

SEQ ID NO: 37182 - DNA, 16 bp, Artificial
  oligonucleotide probe
tggcggtcgcctcgag

SEQ ID NO: 37183 - DNA, 16 bp, Artificial
  oligonucleotide probe
tggcggtcgcctcgag

SEQ ID NO: 37184 - DNA, 16 bp, Artificial
  oligonucleotide probe
gcgacgagcgagccaa

SEQ ID NO: 37185 - DNA, 16 bp, Artificial
  oligonucleotide probe
gcgacgagcgagccaa

SEQ ID NO: 37186 - DNA, 16 bp, Artificial
  oligonucleotide probe
cggagcctgagcgtgg

SEQ ID NO: 37187 - DNA, 16 bp, Artificial
  oligonucleotide probe
cggagcctgagcgtgg

SEQ ID NO: 37188 - DNA, 16 bp, Artificial
  oligonucleotide probe
cgagcggaggtcccaa

SEQ ID NO: 37189 - DNA, 16 bp, Artificial
  oligonucleotide probe
cgagcggaggtcccaa

SEQ ID NO: 37190 - DNA, 16 bp, Artificial
  oligonucleotide probe
caccgacgggaaacgc

SEQ ID NO: 37191 - DNA, 16 bp, Artificial
  oligonucleotide probe
caccgacgggaaacgc

SEQ ID NO: 37192 - DNA, 16 bp, Artificial
  oligonucleotide probe
gtggcaggagcgacgc

SEQ ID NO: 37193 - DNA, 16 bp, Artificial
  oligonucleotide probe
gtggcaggagcgacgc

SEQ ID NO: 37194 - DNA, 16 bp, Artificial
  oligonucleotide probe
gcctagcgcctcgacg

SEQ ID NO: 37195 - DNA, 16 bp, Artificial
  oligonucleotide probe
gcctagcgcctcgacg

SEQ ID NO: 37196 - DNA, 16 bp, Artificial
  oligonucleotide probe
gtggcggaggtcggaa

SEQ ID NO: 37197 - DNA, 16 bp, Artificial
  oligonucleotide probe
gtggcggaggtcggaa

SEQ ID NO: 37198 - DNA, 16 bp, Artificial
  oligonucleotide probe
agcggtccgcgagagc

SEQ ID NO: 37199 - DNA, 16 bp, Artificial
  oligonucleotide probe
agcggtccgcgagagc

SEQ ID NO: 37200 - DNA, 16 bp, Artificial
  oligonucleotide probe
gcgaagcggcgaggtc

SEQ ID NO: 37201 - DNA, 16 bp, Artificial
  oligonucleotide probe
gcgaagcggcgaggtc

SEQ ID NO: 37202 - DNA, 16 bp, Artificial
  oligonucleotide probe
gtccgggtcaggcagg

SEQ ID NO: 37203 - DNA, 16 bp, Artificial
  oligonucleotide probe
gtccgggtcaggcagg

SEQ ID NO: 37204 - DNA, 16 bp, Artificial
  oligonucleotide probe
gcgaagcggcgaggtc

SEQ ID NO: 37205 - DNA, 16 bp, Artificial
  oligonucleotide probe
gcgaagcggcgaggtc

SEQ ID NO: 37206 - DNA, 16 bp, Artificial
  oligonucleotide probe
gcagcctctggccgag

SEQ ID NO: 37207 - DNA, 16 bp, Artificial
  oligonucleotide probe
gcagcctctggccgag

SEQ ID NO: 37208 - DNA, 16 bp, Artificial
  oligonucleotide probe
gcgaagcggcgaggtc

SEQ ID NO: 37209 - DNA, 16 bp, Artificial
  oligonucleotide probe
gcgaagcggcgaggtc

SEQ ID NO: 37210 - DNA, 16 bp, Artificial
  oligonucleotide probe
acgcaccagtcccgga

SEQ ID NO: 37211 - DNA, 16 bp, Artificial
  oligonucleotide probe
acgcaccagtcccgga

SEQ ID NO: 37212 - DNA, 16 bp, Artificial
  oligonucleotide probe
agcggtccgcgagagc

SEQ ID NO: 37213 - DNA, 16 bp, Artificial
  oligonucleotide probe
agcggtccgcgagagc

SEQ ID NO: 37214 - DNA, 16 bp, Artificial
  oligonucleotide probe
ggtccggagcagacgc

SEQ ID NO: 37215 - DNA, 16 bp, Artificial
  oligonucleotide probe
ggtccggagcagacgc

SEQ ID NO: 37216 - DNA, 16 bp, Artificial
  oligonucleotide probe
gagcgcctcctcgagc

SEQ ID NO: 37217 - DNA, 16 bp, Artificial
  oligonucleotide probe
gagcgcctcctcgagc

SEQ ID NO: 37218 - DNA, 16 bp, Artificial
  oligonucleotide probe
gacgcaggcggagggt

SEQ ID NO: 37219 - DNA, 16 bp, Artificial
  oligonucleotide probe
gacgcaggcggagggt

SEQ ID NO: 37220 - DNA, 16 bp, Artificial
  oligonucleotide probe
gcctgggtcaccacgc

SEQ ID NO: 37221 - DNA, 16 bp, Artificial
  oligonucleotide probe
gcctgggtcaccacgc

SEQ ID NO: 37222 - DNA, 16 bp, Artificial
  oligonucleotide probe
gcctagcgcctcgacg

SEQ ID NO: 37223 - DNA, 16 bp, Artificial
  oligonucleotide probe
gcctagcgcctcgacg

SEQ ID NO: 37224 - DNA, 16 bp, Artificial
  oligonucleotide probe
accatggcacgcgacg

SEQ ID NO: 37225 - DNA, 16 bp, Artificial
  oligonucleotide probe
accatggcacgcgacg

SEQ ID NO: 37226 - DNA, 16 bp, Artificial
  oligonucleotide probe
gcaggtggtggcgagc

SEQ ID NO: 37227 - DNA, 16 bp, Artificial
  oligonucleotide probe
gcaggtggtggcgagc

SEQ ID NO: 37228 - DNA, 16 bp, Artificial
  oligonucleotide probe
tggcgtgggggtccaa

SEQ ID NO: 37229 - DNA, 16 bp, Artificial
  oligonucleotide probe
tggcgtgggggtccaa

SEQ ID NO: 37230 - DNA, 16 bp, Artificial
  oligonucleotide probe
gagcgcgacacccagg

SEQ ID NO: 37231 - DNA, 16 bp, Artificial
  oligonucleotide probe
gagcgcgacacccagg

SEQ ID NO: 37232 - DNA, 16 bp, Artificial
  oligonucleotide probe
ggaaagcggcctggaa

SEQ ID NO: 37233 - DNA, 16 bp, Artificial
  oligonucleotide probe
ggaaagcggcctggaa

SEQ ID NO: 37234 - DNA, 16 bp, Artificial
  oligonucleotide probe
gagcgcgacacccagg

SEQ ID NO: 37235 - DNA, 16 bp, Artificial
  oligonucleotide probe
gagcgcgacacccagg

SEQ ID NO: 37236 - DNA, 16 bp, Artificial
  oligonucleotide probe
gcgagtggcagggcct

SEQ ID NO: 37237 - DNA, 16 bp, Artificial
  oligonucleotide probe
gcgagtggcagggcct

SEQ ID NO: 37238 - DNA, 16 bp, Artificial
  oligonucleotide probe
gcgacgagcgagccaa

SEQ ID NO: 37239 - DNA, 16 bp, Artificial
  oligonucleotide probe
gcgacgagcgagccaa

SEQ ID NO: 37240 - DNA, 16 bp, Artificial
  oligonucleotide probe
acgcaccagtcccgga

SEQ ID NO: 37241 - DNA, 16 bp, Artificial
  oligonucleotide probe
acgcaccagtcccgga

SEQ ID NO: 37242 - DNA, 16 bp, Artificial
  oligonucleotide probe
caccgggtggtcagcg

SEQ ID NO: 37243 - DNA, 16 bp, Artificial
  oligonucleotide probe
caccgggtggtcagcg

SEQ ID NO: 37244 - DNA, 16 bp, Artificial
  oligonucleotide probe
gtccacgctggcgacg

SEQ ID NO: 37245 - DNA, 16 bp, Artificial
  oligonucleotide probe
gtccacgctggcgacg

SEQ ID NO: 37246 - DNA, 16 bp, Artificial
  oligonucleotide probe
gcctagcgcctcgacg

SEQ ID NO: 37247 - DNA, 16 bp, Artificial
  oligonucleotide probe
gcctagcgcctcgacg

SEQ ID NO: 37248 - DNA, 16 bp, Artificial
  oligonucleotide probe
gtccacgctggcgacg

SEQ ID NO: 37249 - DNA, 16 bp, Artificial
  oligonucleotide probe
gtccacgctggcgacg

SEQ ID NO: 37250 - DNA, 16 bp, Artificial
  oligonucleotide probe
caggggaagggtcgga

SEQ ID NO: 37251 - DNA, 16 bp, Artificial
  oligonucleotide probe
caggggaagggtcgga

SEQ ID NO: 37252 - DNA, 16 bp, Artificial
  oligonucleotide probe
caccgacgggaaacgc

SEQ ID NO: 37253 - DNA, 16 bp, Artificial
  oligonucleotide probe
caccgacgggaaacgc

SEQ ID NO: 37254 - DNA, 16 bp, Artificial
  oligonucleotide probe
accatggcacgcgacg

SEQ ID NO: 37255 - DNA, 16 bp, Artificial
  oligonucleotide probe
accatggcacgcgacg

SEQ ID NO: 37256 - DNA, 16 bp, Artificial
  oligonucleotide probe
caccgggtggtcagcg

SEQ ID NO: 37257 - DNA, 16 bp, Artificial
  oligonucleotide probe
caccgggtggtcagcg

SEQ ID NO: 37258 - DNA, 16 bp, Artificial
  oligonucleotide probe
gcctcggagacggcag

SEQ ID NO: 37259 - DNA, 16 bp, Artificial
  oligonucleotide probe
gcctcggagacggcag

SEQ ID NO: 37260 - DNA, 16 bp, Artificial
  oligonucleotide probe
gacggcgagtgggcag

SEQ ID NO: 37261 - DNA, 16 bp, Artificial
  oligonucleotide probe
gacggcgagtgggcag

SEQ ID NO: 37262 - DNA, 16 bp, Artificial
  oligonucleotide probe
tggcggtcgcctcgag

SEQ ID NO: 37263 - DNA, 16 bp, Artificial
  oligonucleotide probe
tggcggtcgcctcgag

SEQ ID NO: 37264 - DNA, 16 bp, Artificial
  oligonucleotide probe
gcaggtggtggcgagc

SEQ ID NO: 37265 - DNA, 16 bp, Artificial
  oligonucleotide probe
gcaggtggtggcgagc

SEQ ID NO: 37266 - DNA, 16 bp, Artificial
  oligonucleotide probe
gcctcggagacggcag

SEQ ID NO: 37267 - DNA, 16 bp, Artificial
  oligonucleotide probe
gcctcggagacggcag

SEQ ID NO: 37268 - DNA, 16 bp, Artificial
  oligonucleotide probe
gcgacgagcgagccaa

SEQ ID NO: 37269 - DNA, 16 bp, Artificial
  oligonucleotide probe
gcgacgagcgagccaa

SEQ ID NO: 37270 - DNA, 16 bp, Artificial
  oligonucleotide probe
gcctcggagacggcag

SEQ ID NO: 37271 - DNA, 16 bp, Artificial
  oligonucleotide probe
gcctcggagacggcag

SEQ ID NO: 37272 - DNA, 16 bp, Artificial
  oligonucleotide probe
accatggcacgcgacg

SEQ ID NO: 37273 - DNA, 16 bp, Artificial
  oligonucleotide probe
accatggcacgcgacg

SEQ ID NO: 37274 - DNA, 16 bp, Artificial
  oligonucleotide probe
gtggcaggagcgacgc

SEQ ID NO: 37275 - DNA, 16 bp, Artificial
  oligonucleotide probe
gtggcaggagcgacgc

SEQ ID NO: 37276 - DNA, 16 bp, Artificial
  oligonucleotide probe
gacggcgagtgggcag

SEQ ID NO: 37277 - DNA, 16 bp, Artificial
  oligonucleotide probe
gacggcgagtgggcag

SEQ ID NO: 37278 - DNA, 16 bp, Artificial
  oligonucleotide probe
gtccgggtcaggcagg

SEQ ID NO: 37279 - DNA, 16 bp, Artificial
  oligonucleotide probe
gtccgggtcaggcagg

SEQ ID NO: 37280 - DNA, 16 bp, Artificial
  oligonucleotide probe
agcgccaatcacgggt

SEQ ID NO: 37281 - DNA, 16 bp, Artificial
  oligonucleotide probe
agcgccaatcacgggt

SEQ ID NO: 37282 - DNA, 16 bp, Artificial
  oligonucleotide probe
caccgcgaggtcacgc

SEQ ID NO: 37283 - DNA, 16 bp, Artificial
  oligonucleotide probe
caccgcgaggtcacgc

SEQ ID NO: 37284 - DNA, 16 bp, Artificial
  oligonucleotide probe
acgcaccagtcccgga

SEQ ID NO: 37285 - DNA, 16 bp, Artificial
  oligonucleotide probe
acgcaccagtcccgga

SEQ ID NO: 37286 - DNA, 16 bp, Artificial
  oligonucleotide probe
gacgcaggcggagggt

SEQ ID NO: 37287 - DNA, 16 bp, Artificial
  oligonucleotide probe
gacgcaggcggagggt

SEQ ID NO: 37288 - DNA, 16 bp, Artificial
  oligonucleotide probe
agcgccaatcacgggt

SEQ ID NO: 37289 - DNA, 16 bp, Artificial
  oligonucleotide probe
agcgccaatcacgggt

SEQ ID NO: 37290 - DNA, 16 bp, Artificial
  oligonucleotide probe
agcggtccgcgagagc

SEQ ID NO: 37291 - DNA, 16 bp, Artificial
  oligonucleotide probe
agcggtccgcgagagc

SEQ ID NO: 37292 - DNA, 16 bp, Artificial
  oligonucleotide probe
accatggcacgcgacg

SEQ ID NO: 37293 - DNA, 16 bp, Artificial
  oligonucleotide probe
accatggcacgcgacg

SEQ ID NO: 37294 - DNA, 16 bp, Artificial
  oligonucleotide probe
gtggcggaggtcggaa

SEQ ID NO: 37295 - DNA, 16 bp, Artificial
  oligonucleotide probe
gtggcggaggtcggaa

SEQ ID NO: 37296 - DNA, 16 bp, Artificial
  oligonucleotide probe
gcctagcgcctcgacg

SEQ ID NO: 37297 - DNA, 16 bp, Artificial
  oligonucleotide probe
gcctagcgcctcgacg

SEQ ID NO: 37298 - DNA, 16 bp, Artificial
  oligonucleotide probe
caccgcgaggtcacgc

SEQ ID NO: 37299 - DNA, 16 bp, Artificial
  oligonucleotide probe
caccgcgaggtcacgc

SEQ ID NO: 37300 - DNA, 16 bp, Artificial
  oligonucleotide probe
tggcgtgggggtccaa

SEQ ID NO: 37301 - DNA, 16 bp, Artificial
  oligonucleotide probe
tggcgtgggggtccaa

SEQ ID NO: 37302 - DNA, 16 bp, Artificial
  oligonucleotide probe
gagcgcctcctcgagc

SEQ ID NO: 37303 - DNA, 16 bp, Artificial
  oligonucleotide probe
gagcgcctcctcgagc

SEQ ID NO: 37304 - DNA, 16 bp, Artificial
  oligonucleotide probe
tggcgtgggggtccaa

SEQ ID NO: 37305 - DNA, 16 bp, Artificial
  oligonucleotide probe
tggcgtgggggtccaa

SEQ ID NO: 37306 - DNA, 16 bp, Artificial
  oligonucleotide probe
caccgcgaggtcacgc

SEQ ID NO: 37307 - DNA, 16 bp, Artificial
  oligonucleotide probe
caccgcgaggtcacgc

SEQ ID NO: 37308 - DNA, 16 bp, Artificial
  oligonucleotide probe
accacggaagcgcgga

SEQ ID NO: 37309 - DNA, 16 bp, Artificial
  oligonucleotide probe
accacggaagcgcgga

SEQ ID NO: 37310 - DNA, 16 bp, Artificial
  oligonucleotide probe
gcaggtggtggcgagc

SEQ ID NO: 37311 - DNA, 16 bp, Artificial
  oligonucleotide probe
gcaggtggtggcgagc

SEQ ID NO: 37312 - DNA, 16 bp, Artificial
  oligonucleotide probe
gacggcgagtgggcag

SEQ ID NO: 37313 - DNA, 16 bp, Artificial
  oligonucleotide probe
gacggcgagtgggcag

SEQ ID NO: 37314 - DNA, 16 bp, Artificial
  oligonucleotide probe
gacgcaggcggagggt

SEQ ID NO: 37315 - DNA, 16 bp, Artificial
  oligonucleotide probe
gacgcaggcggagggt

SEQ ID NO: 37316 - DNA, 16 bp, Artificial
  oligonucleotide probe
gcctagcgcctcgacg

SEQ ID NO: 37317 - DNA, 16 bp, Artificial
  oligonucleotide probe
gcctagcgcctcgacg

SEQ ID NO: 37318 - DNA, 16 bp, Artificial
  oligonucleotide probe
gcctagcgcctcgacg

SEQ ID NO: 37319 - DNA, 16 bp, Artificial
  oligonucleotide probe
gcctagcgcctcgacg

SEQ ID NO: 37320 - DNA, 16 bp, Artificial
  oligonucleotide probe
gtccacgctggcgacg

SEQ ID NO: 37321 - DNA, 16 bp, Artificial
  oligonucleotide probe
gtccacgctggcgacg

SEQ ID NO: 37322 - DNA, 16 bp, Artificial
  oligonucleotide probe
gcctgtgggtccgcga

SEQ ID NO: 37323 - DNA, 16 bp, Artificial
  oligonucleotide probe
gcctgtgggtccgcga

SEQ ID NO: 37324 - DNA, 16 bp, Artificial
  oligonucleotide probe
gcaggcagccaatggc

SEQ ID NO: 37325 - DNA, 16 bp, Artificial
  oligonucleotide probe
gcaggcagccaatggc

SEQ ID NO: 37326 - DNA, 16 bp, Artificial
  oligonucleotide probe
gtggcggaggtcggaa

SEQ ID NO: 37327 - DNA, 16 bp, Artificial
  oligonucleotide probe
gtggcggaggtcggaa

SEQ ID NO: 37328 - DNA, 16 bp, Artificial
  oligonucleotide probe
gacggacgacgcgtgg

SEQ ID NO: 37329 - DNA, 16 bp, Artificial
  oligonucleotide probe
gacggacgacgcgtgg

SEQ ID NO: 37330 - DNA, 16 bp, Artificial
  oligonucleotide probe
ggaaagcggcctggaa

SEQ ID NO: 37331 - DNA, 16 bp, Artificial
  oligonucleotide probe
ggaaagcggcctggaa

SEQ ID NO: 37332 - DNA, 16 bp, Artificial
  oligonucleotide probe
agcgccaatcacgggt

SEQ ID NO: 37333 - DNA, 16 bp, Artificial
  oligonucleotide probe
agcgccaatcacgggt

SEQ ID NO: 37334 - DNA, 16 bp, Artificial
  oligonucleotide probe
gtccacgctggcgacg

SEQ ID NO: 37335 - DNA, 16 bp, Artificial
  oligonucleotide probe
gtccacgctggcgacg

SEQ ID NO: 37336 - DNA, 16 bp, Artificial
  oligonucleotide probe
accatggcacgcgacg

SEQ ID NO: 37337 - DNA, 16 bp, Artificial
  oligonucleotide probe
accatggcacgcgacg

SEQ ID NO: 37338 - DNA, 16 bp, Artificial
  oligonucleotide probe
gcctagcgcctcgacg

SEQ ID NO: 37339 - DNA, 16 bp, Artificial
  oligonucleotide probe
gcctagcgcctcgacg

SEQ ID NO: 37340 - DNA, 16 bp, Artificial
  oligonucleotide probe
caccgggtggtcagcg

SEQ ID NO: 37341 - DNA, 16 bp, Artificial
  oligonucleotide probe
caccgggtggtcagcg

SEQ ID NO: 37342 - DNA, 16 bp, Artificial
  oligonucleotide probe
caggggaagggtcgga

SEQ ID NO: 37343 - DNA, 16 bp, Artificial
  oligonucleotide probe
caggggaagggtcgga

SEQ ID NO: 37344 - DNA, 16 bp, Artificial
  oligonucleotide probe
gtggcggaggtcggaa

SEQ ID NO: 37345 - DNA, 16 bp, Artificial
  oligonucleotide probe
gtggcggaggtcggaa

SEQ ID NO: 37346 - DNA, 16 bp, Artificial
  oligonucleotide probe
caccgggtggtcagcg

SEQ ID NO: 37347 - DNA, 16 bp, Artificial
  oligonucleotide probe
caccgggtggtcagcg

SEQ ID NO: 37348 - DNA, 16 bp, Artificial
  oligonucleotide probe
gacggcgagtgggcag

SEQ ID NO: 37349 - DNA, 16 bp, Artificial
  oligonucleotide probe
gacggcgagtgggcag

SEQ ID NO: 37350 - DNA, 16 bp, Artificial
  oligonucleotide probe
gcgaagcggcgaggtc

SEQ ID NO: 37351 - DNA, 16 bp, Artificial
  oligonucleotide probe
gcgaagcggcgaggtc

SEQ ID NO: 37352 - DNA, 16 bp, Artificial
  oligonucleotide probe
agcgccaatcacgggt

SEQ ID NO: 37353 - DNA, 16 bp, Artificial
  oligonucleotide probe
agcgccaatcacgggt

SEQ ID NO: 37354 - DNA, 16 bp, Artificial
  oligonucleotide probe
cagggcagggtcgggt

SEQ ID NO: 37355 - DNA, 16 bp, Artificial
  oligonucleotide probe
cagggcagggtcgggt

SEQ ID NO: 37356 - DNA, 16 bp, Artificial
  oligonucleotide probe
agcggtccgcgagagc

SEQ ID NO: 37357 - DNA, 16 bp, Artificial
  oligonucleotide probe
agcggtccgcgagagc

SEQ ID NO: 37358 - DNA, 16 bp, Artificial
  oligonucleotide probe
gcgacgagcgagccaa

SEQ ID NO: 37359 - DNA, 16 bp, Artificial
  oligonucleotide probe
gcgacgagcgagccaa

SEQ ID NO: 37360 - DNA, 16 bp, Artificial
  oligonucleotide probe
agcggcgagagcgtcc

SEQ ID NO: 37361 - DNA, 16 bp, Artificial
  oligonucleotide probe
agcggcgagagcgtcc

SEQ ID NO: 37362 - DNA, 16 bp, Artificial
  oligonucleotide probe
cgagcggaggtcccaa

SEQ ID NO: 37363 - DNA, 16 bp, Artificial
  oligonucleotide probe
cgagcggaggtcccaa

SEQ ID NO: 37364 - DNA, 16 bp, Artificial
  oligonucleotide probe
caggcctccctcgcga

SEQ ID NO: 37365 - DNA, 16 bp, Artificial
  oligonucleotide probe
caggcctccctcgcga

SEQ ID NO: 37366 - DNA, 16 bp, Artificial
  oligonucleotide probe
agcggcgagagcgtcc

SEQ ID NO: 37367 - DNA, 16 bp, Artificial
  oligonucleotide probe
agcggcgagagcgtcc

SEQ ID NO: 37368 - DNA, 16 bp, Artificial
  oligonucleotide probe
acgccaccgcctgacg

SEQ ID NO: 37369 - DNA, 16 bp, Artificial
  oligonucleotide probe
acgccaccgcctgacg

SEQ ID NO: 37370 - DNA, 16 bp, Artificial
  oligonucleotide probe
acgccaccgcctgacg

SEQ ID NO: 37371 - DNA, 16 bp, Artificial
  oligonucleotide probe
acgccaccgcctgacg

SEQ ID NO: 37372 - DNA, 16 bp, Artificial
  oligonucleotide probe
cagggcagggtcgggt

SEQ ID NO: 37373 - DNA, 16 bp, Artificial
  oligonucleotide probe
cagggcagggtcgggt

SEQ ID NO: 37374 - DNA, 16 bp, Artificial
  oligonucleotide probe
cggagcctgagcgtgg

SEQ ID NO: 37375 - DNA, 16 bp, Artificial
  oligonucleotide probe
cggagcctgagcgtgg

SEQ ID NO: 37376 - DNA, 16 bp, Artificial
  oligonucleotide probe
gggtacgcgacgcgag

SEQ ID NO: 37377 - DNA, 16 bp, Artificial
  oligonucleotide probe
gggtacgcgacgcgag

SEQ ID NO: 37378 - DNA, 16 bp, Artificial
  oligonucleotide probe
agcggcgagagcgtcc

SEQ ID NO: 37379 - DNA, 16 bp, Artificial
  oligonucleotide probe
agcggcgagagcgtcc

SEQ ID NO: 37380 - DNA, 16 bp, Artificial
  oligonucleotide probe
agcgcaccgacgacgc

SEQ ID NO: 37381 - DNA, 16 bp, Artificial
  oligonucleotide probe
agcgcaccgacgacgc

SEQ ID NO: 37382 - DNA, 16 bp, Artificial
  oligonucleotide probe
gtggcgagcctcgggt

SEQ ID NO: 37383 - DNA, 16 bp, Artificial
  oligonucleotide probe
tgctcggatgctgcga

SEQ ID NO: 37384 - DNA, 16 bp, Artificial
  oligonucleotide probe
cgagcaccgagccgga

SEQ ID NO: 37385 - DNA, 16 bp, Artificial
  oligonucleotide probe
gcgacagggcctgcct

SEQ ID NO: 37386 - DNA, 16 bp, Artificial
  oligonucleotide probe
gcgacagggcctgcct

SEQ ID NO: 37387 - DNA, 16 bp, Artificial
  oligonucleotide probe
actgcggacgaggcct

SEQ ID NO: 37388 - DNA, 16 bp, Artificial
  oligonucleotide probe
actgcggacgaggcct

SEQ ID NO: 37389 - DNA, 16 bp, Artificial
  oligonucleotide probe
acgcaccagtcccgga

SEQ ID NO: 37390 - DNA, 16 bp, Artificial
  oligonucleotide probe
acgcaccagtcccgga

SEQ ID NO: 37391 - DNA, 16 bp, Artificial
  oligonucleotide probe
tgctcggatgctgcga

SEQ ID NO: 37392 - DNA, 16 bp, Artificial
  oligonucleotide probe
tgctcggatgctgcga

SEQ ID NO: 37393 - DNA, 16 bp, Artificial
  oligonucleotide probe
gagcgacgcgagagcg

SEQ ID NO: 37394 - DNA, 16 bp, Artificial
  oligonucleotide probe
gagcgacgcgagagcg

SEQ ID NO: 37395 - DNA, 16 bp, Artificial
  oligonucleotide probe
accacggaagcgcgga

SEQ ID NO: 37396 - DNA, 16 bp, Artificial
  oligonucleotide probe
accacggaagcgcgga

SEQ ID NO: 37397 - DNA, 16 bp, Artificial
  oligonucleotide probe
gcctcaggacgcacgc

SEQ ID NO: 37398 - DNA, 16 bp, Artificial
  oligonucleotide probe
gcctcaggacgcacgc

SEQ ID NO: 37399 - DNA, 16 bp, Artificial
  oligonucleotide probe
caggcctccctcgcga

SEQ ID NO: 37400 - DNA, 16 bp, Artificial
  oligonucleotide probe
caggcctccctcgcga

SEQ ID NO: 37401 - DNA, 16 bp, Artificial
  oligonucleotide probe
gagcgcctcctcgagc

SEQ ID NO: 37402 - DNA, 16 bp, Artificial
  oligonucleotide probe
gagcgcctcctcgagc

SEQ ID NO: 37403 - DNA, 16 bp, Artificial
  oligonucleotide probe
tgctcggatgctgcga

SEQ ID NO: 37404 - DNA, 16 bp, Artificial
  oligonucleotide probe
tgctcggatgctgcga

SEQ ID NO: 37405 - DNA, 16 bp, Artificial
  oligonucleotide probe
cacccgagagcggtgg

SEQ ID NO: 37406 - DNA, 16 bp, Artificial
  oligonucleotide probe
cacccgagagcggtgg

SEQ ID NO: 37407 - DNA, 16 bp, Artificial
  oligonucleotide probe
gggtacgcgacgcgag

SEQ ID NO: 37408 - DNA, 16 bp, Artificial
  oligonucleotide probe
gggtacgcgacgcgag

SEQ ID NO: 37409 - DNA, 16 bp, Artificial
  oligonucleotide probe
gtggcgagcctcgggt

SEQ ID NO: 37410 - DNA, 16 bp, Artificial
  oligonucleotide probe
gtggcgagcctcgggt

SEQ ID NO: 37411 - DNA, 16 bp, Artificial
  oligonucleotide probe
acgcagcggggtgacg

SEQ ID NO: 37412 - DNA, 16 bp, Artificial
  oligonucleotide probe
acgcagcggggtgacg

SEQ ID NO: 37413 - DNA, 16 bp, Artificial
  oligonucleotide probe
gcgacctcacgcgcag

SEQ ID NO: 37414 - DNA, 16 bp, Artificial
  oligonucleotide probe
gcgacctcacgcgcag

SEQ ID NO: 37415 - DNA, 16 bp, Artificial
  oligonucleotide probe
acgcccaacagggagc

SEQ ID NO: 37416 - DNA, 16 bp, Artificial
  oligonucleotide probe
acgcccaacagggagc

SEQ ID NO: 37417 - DNA, 16 bp, Artificial
  oligonucleotide probe
gagcgagcagcgggtc

SEQ ID NO: 37418 - DNA, 16 bp, Artificial
  oligonucleotide probe
gagcgagcagcgggtc

SEQ ID NO: 37419 - DNA, 16 bp, Artificial
  oligonucleotide probe
agcgcaccgacgacgc

SEQ ID NO: 37420 - DNA, 16 bp, Artificial
  oligonucleotide probe
agcgcaccgacgacgc

SEQ ID NO: 37421 - DNA, 16 bp, Artificial
  oligonucleotide probe
gcgaagcggcgaggtc

SEQ ID NO: 37422 - DNA, 16 bp, Artificial
  oligonucleotide probe
gcgaagcggcgaggtc

SEQ ID NO: 37423 - DNA, 16 bp, Artificial
  oligonucleotide probe
acgccaccgcctgacg

SEQ ID NO: 37424 - DNA, 16 bp, Artificial
  oligonucleotide probe
acgccaccgcctgacg

SEQ ID NO: 37425 - DNA, 16 bp, Artificial
  oligonucleotide probe
gtggcaggagcgacgc

SEQ ID NO: 37426 - DNA, 16 bp, Artificial
  oligonucleotide probe
gtggcaggagcgacgc

SEQ ID NO: 37427 - DNA, 16 bp, Artificial
  oligonucleotide probe
gcctgtgggtccgcga

SEQ ID NO: 37428 - DNA, 16 bp, Artificial
  oligonucleotide probe
gcctgtgggtccgcga

SEQ ID NO: 37429 - DNA, 16 bp, Artificial
  oligonucleotide probe
gtccgggtcaggcagg

SEQ ID NO: 37430 - DNA, 16 bp, Artificial
  oligonucleotide probe
gtccgggtcaggcagg

SEQ ID NO: 37431 - DNA, 16 bp, Artificial
  oligonucleotide probe
cggagcctgagcgtgg

SEQ ID NO: 37432 - DNA, 16 bp, Artificial
  oligonucleotide probe
cggagcctgagcgtgg

SEQ ID NO: 37433 - DNA, 16 bp, Artificial
  oligonucleotide probe
cggagcctgagcgtgg

SEQ ID NO: 37434 - DNA, 16 bp, Artificial
  oligonucleotide probe
cggagcctgagcgtgg

SEQ ID NO: 37435 - DNA, 16 bp, Artificial
  oligonucleotide probe
gtggcggaggtcggaa

SEQ ID NO: 37436 - DNA, 16 bp, Artificial
  oligonucleotide probe
gtggcggaggtcggaa

SEQ ID NO: 37437 - DNA, 16 bp, Artificial
  oligonucleotide probe
caggcctccctcgcga

SEQ ID NO: 37438 - DNA, 16 bp, Artificial
  oligonucleotide probe
caggcctccctcgcga

SEQ ID NO: 37439 - DNA, 16 bp, Artificial
  oligonucleotide probe
agcggcgagagcgtcc

SEQ ID NO: 37440 - DNA, 16 bp, Artificial
  oligonucleotide probe
agcggcgagagcgtcc

SEQ ID NO: 37441 - DNA, 16 bp, Artificial
  oligonucleotide probe
gtgggggtgcagggaa

SEQ ID NO: 37442 - DNA, 16 bp, Artificial
  oligonucleotide probe
gtgggggtgcagggaa

SEQ ID NO: 37443 - DNA, 16 bp, Artificial
  oligonucleotide probe
gagcgacgcgagagcg

SEQ ID NO: 37444 - DNA, 16 bp, Artificial
  oligonucleotide probe
gagcgacgcgagagcg

SEQ ID NO: 37445 - DNA, 16 bp, Artificial
  oligonucleotide probe
ggaacggaagcggagc

SEQ ID NO: 37446 - DNA, 16 bp, Artificial
  oligonucleotide probe
ggaacggaagcggagc

SEQ ID NO: 37447 - DNA, 16 bp, Artificial
  oligonucleotide probe
tggcaccagcaggggt

SEQ ID NO: 37448 - DNA, 16 bp, Artificial
  oligonucleotide probe
tggcaccagcaggggt

SEQ ID NO: 37449 - DNA, 16 bp, Artificial
  oligonucleotide probe
gcaggcagccaatggc

SEQ ID NO: 37450 - DNA, 16 bp, Artificial
  oligonucleotide probe
gcaggcagccaatggc

SEQ ID NO: 37451 - DNA, 16 bp, Artificial
  oligonucleotide probe
acgcccaacagggagc

SEQ ID NO: 37452 - DNA, 16 bp, Artificial
  oligonucleotide probe
acgcccaacagggagc

SEQ ID NO: 37453 - DNA, 16 bp, Artificial
  oligonucleotide probe
gtgggggtgcagggaa

SEQ ID NO: 37454 - DNA, 16 bp, Artificial
  oligonucleotide probe
gtgggggtgcagggaa

SEQ ID NO: 37455 - DNA, 16 bp, Artificial
  oligonucleotide probe
gacggcgagtgggcag

SEQ ID NO: 37456 - DNA, 16 bp, Artificial
  oligonucleotide probe
gacggcgagtgggcag

SEQ ID NO: 37457 - DNA, 16 bp, Artificial
  oligonucleotide probe
gcctcaggacgcacgc

SEQ ID NO: 37458 - DNA, 16 bp, Artificial
  oligonucleotide probe
gcctcaggacgcacgc

SEQ ID NO: 37459 - DNA, 16 bp, Artificial
  oligonucleotide probe
ggtcgcgacacctggc

SEQ ID NO: 37460 - DNA, 16 bp, Artificial
  oligonucleotide probe
ggtcgcgacacctggc

SEQ ID NO: 37461 - DNA, 16 bp, Artificial
  oligonucleotide probe
gtgggggtgcagggaa

SEQ ID NO: 37462 - DNA, 16 bp, Artificial
  oligonucleotide probe
gtgggggtgcagggaa

SEQ ID NO: 37463 - DNA, 16 bp, Artificial
  oligonucleotide probe
tggcgggtgacggtgg

SEQ ID NO: 37464 - DNA, 16 bp, Artificial
  oligonucleotide probe
tggcgggtgacggtgg

SEQ ID NO: 37465 - DNA, 16 bp, Artificial
  oligonucleotide probe
ggtcgcgacacctggc

SEQ ID NO: 37466 - DNA, 16 bp, Artificial
  oligonucleotide probe
ggtcgcgacacctggc

SEQ ID NO: 37467 - DNA, 16 bp, Artificial
  oligonucleotide probe
gacggacgacgcgtgg

SEQ ID NO: 37468 - DNA, 16 bp, Artificial
  oligonucleotide probe
gacggacgacgcgtgg

SEQ ID NO: 37469 - DNA, 16 bp, Artificial
  oligonucleotide probe
agcgccaatcacgggt

SEQ ID NO: 37470 - DNA, 16 bp, Artificial
  oligonucleotide probe
agcgccaatcacgggt

SEQ ID NO: 37471 - DNA, 16 bp, Artificial
  oligonucleotide probe
gcctcaggacgcacgc

SEQ ID NO: 37472 - DNA, 16 bp, Artificial
  oligonucleotide probe
gcctcaggacgcacgc

SEQ ID NO: 37473 - DNA, 16 bp, Artificial
  oligonucleotide probe
actgcggacgaggcct

SEQ ID NO: 37474 - DNA, 16 bp, Artificial
  oligonucleotide probe
actgcggacgaggcct

SEQ ID NO: 37475 - DNA, 16 bp, Artificial
  oligonucleotide probe
gcagcctctggccgag

SEQ ID NO: 37476 - DNA, 16 bp, Artificial
  oligonucleotide probe
gcagcctctggccgag

SEQ ID NO: 37477 - DNA, 16 bp, Artificial
  oligonucleotide probe
caggggaagggtcgga

SEQ ID NO: 37478 - DNA, 16 bp, Artificial
  oligonucleotide probe
caggggaagggtcgga

SEQ ID NO: 37479 - DNA, 16 bp, Artificial
  oligonucleotide probe
gggtagcggcgagacg

SEQ ID NO: 37480 - DNA, 16 bp, Artificial
  oligonucleotide probe
gggtagcggcgagacg

SEQ ID NO: 37481 - DNA, 16 bp, Artificial
  oligonucleotide probe
cctcgtggcggacgga

SEQ ID NO: 37482 - DNA, 16 bp, Artificial
  oligonucleotide probe
cctcgtggcggacgga

SEQ ID NO: 37483 - DNA, 16 bp, Artificial
  oligonucleotide probe
gcgacgagcgagccaa

SEQ ID NO: 37484 - DNA, 16 bp, Artificial
  oligonucleotide probe
gcgacgagcgagccaa

SEQ ID NO: 37485 - DNA, 16 bp, Artificial
  oligonucleotide probe
gagcgcgacacccagg

SEQ ID NO: 37486 - DNA, 16 bp, Artificial
  oligonucleotide probe
gagcgcgacacccagg

SEQ ID NO: 37487 - DNA, 16 bp, Artificial
  oligonucleotide probe
cgagcaccgagccgga

SEQ ID NO: 37488 - DNA, 16 bp, Artificial
  oligonucleotide probe
cgagcaccgagccgga

SEQ ID NO: 37489 - DNA, 16 bp, Artificial
  oligonucleotide probe
acgcccaacagggagc

SEQ ID NO: 37490 - DNA, 16 bp, Artificial
  oligonucleotide probe
acgcccaacagggagc

SEQ ID NO: 37491 - DNA, 16 bp, Artificial
  oligonucleotide probe
tggcaccagcaggggt

SEQ ID NO: 37492 - DNA, 16 bp, Artificial
  oligonucleotide probe
tggcaccagcaggggt

SEQ ID NO: 37493 - DNA, 16 bp, Artificial
  oligonucleotide probe
gcgacagggcctgcct

SEQ ID NO: 37494 - DNA, 16 bp, Artificial
  oligonucleotide probe
gcgacagggcctgcct

SEQ ID NO: 37495 - DNA, 16 bp, Artificial
  oligonucleotide probe
gggtagcggcgagacg

SEQ ID NO: 37496 - DNA, 16 bp, Artificial
  oligonucleotide probe
gggtagcggcgagacg

SEQ ID NO: 37497 - DNA, 16 bp, Artificial
  oligonucleotide probe
gcgacagggcctgcct

SEQ ID NO: 37498 - DNA, 16 bp, Artificial
  oligonucleotide probe
gcgacagggcctgcct

SEQ ID NO: 37499 - DNA, 16 bp, Artificial
  oligonucleotide probe
cgagcggaggtcccaa

SEQ ID NO: 37500 - DNA, 16 bp, Artificial
  oligonucleotide probe
cgagcggaggtcccaa

SEQ ID NO: 37501 - DNA, 16 bp, Artificial
  oligonucleotide probe
gtggcgagcctcgggt

SEQ ID NO: 37502 - DNA, 16 bp, Artificial
  oligonucleotide probe
gtggcgagcctcgggt

SEQ ID NO: 37503 - DNA, 16 bp, Artificial
  oligonucleotide probe
cgagcggaggtcccaa

SEQ ID NO: 37504 - DNA, 16 bp, Artificial
  oligonucleotide probe
cgagcggaggtcccaa

SEQ ID NO: 37505 - DNA, 16 bp, Artificial
  oligonucleotide probe
cgagcaccgagccgga

SEQ ID NO: 37506 - DNA, 16 bp, Artificial
  oligonucleotide probe
cgagcaccgagccgga

SEQ ID NO: 37507 - DNA, 16 bp, Artificial
  oligonucleotide probe
cggagcctgagcgtgg

SEQ ID NO: 37508 - DNA, 16 bp, Artificial
  oligonucleotide probe
cggagcctgagcgtgg

SEQ ID NO: 37509 - DNA, 16 bp, Artificial
  oligonucleotide probe
tggcgtgggggtccaa

SEQ ID NO: 37510 - DNA, 16 bp, Artificial
  oligonucleotide probe
tggcgtgggggtccaa

SEQ ID NO: 37511 - DNA, 16 bp, Artificial
  oligonucleotide probe
acgcagcggggtgacg

SEQ ID NO: 37512 - DNA, 16 bp, Artificial
  oligonucleotide probe
acgcagcggggtgacg

SEQ ID NO: 37513 - DNA, 16 bp, Artificial
  oligonucleotide probe
caccgggtggtcagcg

SEQ ID NO: 37514 - DNA, 16 bp, Artificial
  oligonucleotide probe
caccgggtggtcagcg

SEQ ID NO: 37515 - DNA, 16 bp, Artificial
  oligonucleotide probe
cggagcaggagcggaa

SEQ ID NO: 37516 - DNA, 16 bp, Artificial
  oligonucleotide probe
cggagcaggagcggaa

SEQ ID NO: 37517 - DNA, 16 bp, Artificial
  oligonucleotide probe
gggtacgcgacgcgag

SEQ ID NO: 37518 - DNA, 16 bp, Artificial
  oligonucleotide probe
gggtacgcgacgcgag

SEQ ID NO: 37519 - DNA, 16 bp, Artificial
  oligonucleotide probe
cagggcagggtcgggt

SEQ ID NO: 37520 - DNA, 16 bp, Artificial
  oligonucleotide probe
cagggcagggtcgggt

SEQ ID NO: 37521 - DNA, 16 bp, Artificial
  oligonucleotide probe
acgccaccgcctgacg

SEQ ID NO: 37522 - DNA, 16 bp, Artificial
  oligonucleotide probe
acgccaccgcctgacg

SEQ ID NO: 37523 - DNA, 16 bp, Artificial
  oligonucleotide probe
gggtagcggcgagacg

SEQ ID NO: 37524 - DNA, 16 bp, Artificial
  oligonucleotide probe
gggtagcggcgagacg

SEQ ID NO: 37525 - DNA, 16 bp, Artificial
  oligonucleotide probe
gcgacctcacgcgcag

SEQ ID NO: 37526 - DNA, 16 bp, Artificial
  oligonucleotide probe
gcgacctcacgcgcag

SEQ ID NO: 37527 - DNA, 16 bp, Artificial
  oligonucleotide probe
ggaaagcggcctggaa

SEQ ID NO: 37528 - DNA, 16 bp, Artificial
  oligonucleotide probe
ggaaagcggcctggaa

SEQ ID NO: 37529 - DNA, 16 bp, Artificial
  oligonucleotide probe
cggagcaggagcggaa

SEQ ID NO: 37530 - DNA, 16 bp, Artificial
  oligonucleotide probe
cggagcaggagcggaa

SEQ ID NO: 37531 - DNA, 16 bp, Artificial
  oligonucleotide probe
gcctcggagacggcag

SEQ ID NO: 37532 - DNA, 16 bp, Artificial
  oligonucleotide probe
gcctcggagacggcag

SEQ ID NO: 37533 - DNA, 16 bp, Artificial
  oligonucleotide probe
gtccgggtcaggcagg

SEQ ID NO: 37534 - DNA, 16 bp, Artificial
  oligonucleotide probe
gtccgggtcaggcagg

SEQ ID NO: 37535 - DNA, 16 bp, Artificial
  oligonucleotide probe
actgcggacgaggcct

SEQ ID NO: 37536 - DNA, 16 bp, Artificial
  oligonucleotide probe
actgcggacgaggcct

SEQ ID NO: 37537 - DNA, 16 bp, Artificial
  oligonucleotide probe
gtccgggtcaggcagg

SEQ ID NO: 37538 - DNA, 16 bp, Artificial
  oligonucleotide probe
gtccgggtcaggcagg

SEQ ID NO: 37539 - DNA, 16 bp, Artificial
  oligonucleotide probe
gagcgagcagcgggtc

SEQ ID NO: 37540 - DNA, 16 bp, Artificial
  oligonucleotide probe
gagcgagcagcgggtc

SEQ ID NO: 37541 - DNA, 16 bp, Artificial
  oligonucleotide probe
agcgcaccgacgacgc

SEQ ID NO: 37542 - DNA, 16 bp, Artificial
  oligonucleotide probe
agcgcaccgacgacgc

SEQ ID NO: 37543 - DNA, 16 bp, Artificial
  oligonucleotide probe
cctccgaggacgcgga

SEQ ID NO: 37544 - DNA, 16 bp, Artificial
  oligonucleotide probe
cctccgaggacgcgga

SEQ ID NO: 37545 - DNA, 16 bp, Artificial
  oligonucleotide probe
caccgacgggaaacgc

SEQ ID NO: 37546 - DNA, 16 bp, Artificial
  oligonucleotide probe
caccgacgggaaacgc

SEQ ID NO: 37547 - DNA, 16 bp, Artificial
  oligonucleotide probe
gtccacgctggcgacg

SEQ ID NO: 37548 - DNA, 16 bp, Artificial
  oligonucleotide probe
gtccacgctggcgacg

SEQ ID NO: 37549 - DNA, 16 bp, Artificial
  oligonucleotide probe
agcggcgagagcgtcc

SEQ ID NO: 37550 - DNA, 16 bp, Artificial
  oligonucleotide probe
agcggcgagagcgtcc

SEQ ID NO: 37551 - DNA, 16 bp, Artificial
  oligonucleotide probe
gagcgagcagcgggtc

SEQ ID NO: 37552 - DNA, 16 bp, Artificial
  oligonucleotide probe
gagcgagcagcgggtc

SEQ ID NO: 37553 - DNA, 16 bp, Artificial
  oligonucleotide probe
caggcctccctcgcga

SEQ ID NO: 37554 - DNA, 16 bp, Artificial
  oligonucleotide probe
caggcctccctcgcga

SEQ ID NO: 37555 - DNA, 16 bp, Artificial
  oligonucleotide probe
tggcacgcgagccagg

SEQ ID NO: 37556 - DNA, 16 bp, Artificial
  oligonucleotide probe
tggcacgcgagccagg

SEQ ID NO: 37557 - DNA, 16 bp, Artificial
  oligonucleotide probe
cctcgtggcggacgga

SEQ ID NO: 37558 - DNA, 16 bp, Artificial
  oligonucleotide probe
cctcgtggcggacgga

SEQ ID NO: 37559 - DNA, 16 bp, Artificial
  oligonucleotide probe
gcgacctcacgcgcag

SEQ ID NO: 37560 - DNA, 16 bp, Artificial
  oligonucleotide probe
gcgacctcacgcgcag

SEQ ID NO: 37561 - DNA, 16 bp, Artificial
  oligonucleotide probe
cggagcaggagcggaa

SEQ ID NO: 37562 - DNA, 16 bp, Artificial
  oligonucleotide probe
cggagcaggagcggaa

SEQ ID NO: 37563 - DNA, 16 bp, Artificial
  oligonucleotide probe
agcggcgagagcgtcc

SEQ ID NO: 37564 - DNA, 16 bp, Artificial
  oligonucleotide probe
agcggcgagagcgtcc

SEQ ID NO: 37565 - DNA, 16 bp, Artificial
  oligonucleotide probe
caggagcgggaagcga

SEQ ID NO: 37566 - DNA, 16 bp, Artificial
  oligonucleotide probe
caggagcgggaagcga

SEQ ID NO: 37567 - DNA, 16 bp, Artificial
  oligonucleotide probe
tggcaccagcaggggt

SEQ ID NO: 37568 - DNA, 16 bp, Artificial
  oligonucleotide probe
tggcaccagcaggggt

SEQ ID NO: 37569 - DNA, 16 bp, Artificial
  oligonucleotide probe
cctcgtggcggacgga

SEQ ID NO: 37570 - DNA, 16 bp, Artificial
  oligonucleotide probe
cctcgtggcggacgga

SEQ ID NO: 37571 - DNA, 16 bp, Artificial
  oligonucleotide probe
caccgcgaggtcacgc

SEQ ID NO: 37572 - DNA, 16 bp, Artificial
  oligonucleotide probe
caccgcgaggtcacgc

SEQ ID NO: 37573 - DNA, 16 bp, Artificial
  oligonucleotide probe
acgcgagcgggtgcag

SEQ ID NO: 37574 - DNA, 16 bp, Artificial
  oligonucleotide probe
acgcgagcgggtgcag

SEQ ID NO: 37575 - DNA, 16 bp, Artificial
  oligonucleotide probe
ggtcgcgacacctggc

SEQ ID NO: 37576 - DNA, 16 bp, Artificial
  oligonucleotide probe
ggtcgcgacacctggc

SEQ ID NO: 37577 - DNA, 16 bp, Artificial
  oligonucleotide probe
tgctcggatgctgcga

SEQ ID NO: 37578 - DNA, 16 bp, Artificial
  oligonucleotide probe
tgctcggatgctgcga

SEQ ID NO: 37579 - DNA, 16 bp, Artificial
  oligonucleotide probe
cagggcagggtcgggt

SEQ ID NO: 37580 - DNA, 16 bp, Artificial
  oligonucleotide probe
cagggcagggtcgggt

SEQ ID NO: 37581 - DNA, 16 bp, Artificial
  oligonucleotide probe
ggtccggagcagacgc

SEQ ID NO: 37582 - DNA, 16 bp, Artificial
  oligonucleotide probe
ggtccggagcagacgc

SEQ ID NO: 37583 - DNA, 16 bp, Artificial
  oligonucleotide probe
gcgagtggcagggcct

SEQ ID NO: 37584 - DNA, 16 bp, Artificial
  oligonucleotide probe
gcgagtggcagggcct

SEQ ID NO: 37585 - DNA, 16 bp, Artificial
  oligonucleotide probe
cgagcggaggtcccaa

SEQ ID NO: 37586 - DNA, 16 bp, Artificial
  oligonucleotide probe
cgagcggaggtcccaa

SEQ ID NO: 37587 - DNA, 16 bp, Artificial
  oligonucleotide probe
cacccgagagcggtgg

SEQ ID NO: 37588 - DNA, 16 bp, Artificial
  oligonucleotide probe
cacccgagagcggtgg

SEQ ID NO: 37589 - DNA, 16 bp, Artificial
  oligonucleotide probe
agcggtccgcgagagc

SEQ ID NO: 37590 - DNA, 16 bp, Artificial
  oligonucleotide probe
agcggtccgcgagagc

SEQ ID NO: 37591 - DNA, 16 bp, Artificial
  oligonucleotide probe
acgccaccgcctgacg

SEQ ID NO: 37592 - DNA, 16 bp, Artificial
  oligonucleotide probe
acgccaccgcctgacg

SEQ ID NO: 37593 - DNA, 16 bp, Artificial
  oligonucleotide probe
accatggcacgcgacg

SEQ ID NO: 37594 - DNA, 16 bp, Artificial
  oligonucleotide probe
accatggcacgcgacg

SEQ ID NO: 37595 - DNA, 16 bp, Artificial
  oligonucleotide probe
ggaacggaagcggagc

SEQ ID NO: 37596 - DNA, 16 bp, Artificial
  oligonucleotide probe
ggaacggaagcggagc

SEQ ID NO: 37597 - DNA, 16 bp, Artificial
  oligonucleotide probe
ggaacggaagcggagc

SEQ ID NO: 37598 - DNA, 16 bp, Artificial
  oligonucleotide probe
ggaacggaagcggagc

SEQ ID NO: 37599 - DNA, 16 bp, Artificial
  oligonucleotide probe
gcctgggtcaccacgc

SEQ ID NO: 37600 - DNA, 16 bp, Artificial
  oligonucleotide probe
gcctgggtcaccacgc

SEQ ID NO: 37601 - DNA, 16 bp, Artificial
  oligonucleotide probe
cgagcaccgagccgga

SEQ ID NO: 37602 - DNA, 16 bp, Artificial
  oligonucleotide probe
cgagcaccgagccgga

SEQ ID NO: 37603 - DNA, 16 bp, Artificial
  oligonucleotide probe
gtggcgagcctcgggt

SEQ ID NO: 37604 - DNA, 16 bp, Artificial
  oligonucleotide probe
gtggcgagcctcgggt

SEQ ID NO: 37605 - DNA, 16 bp, Artificial
  oligonucleotide probe
cacccgagagcggtgg

SEQ ID NO: 37606 - DNA, 16 bp, Artificial
  oligonucleotide probe
cacccgagagcggtgg

SEQ ID NO: 37607 - DNA, 16 bp, Artificial
  oligonucleotide probe
gacgcaggcggagggt

SEQ ID NO: 37608 - DNA, 16 bp, Artificial
  oligonucleotide probe
gacgcaggcggagggt

SEQ ID NO: 37609 - DNA, 16 bp, Artificial
  oligonucleotide probe
gcctagcgcctcgacg

SEQ ID NO: 37610 - DNA, 16 bp, Artificial
  oligonucleotide probe
gcctagcgcctcgacg

SEQ ID NO: 37611 - DNA, 16 bp, Artificial
  oligonucleotide probe
tggcggtcgcctcgag

SEQ ID NO: 37612 - DNA, 16 bp, Artificial
  oligonucleotide probe
tggcggtcgcctcgag

SEQ ID NO: 37613 - DNA, 16 bp, Artificial
  oligonucleotide probe
gcaggtggtggcgagc

SEQ ID NO: 37614 - DNA, 16 bp, Artificial
  oligonucleotide probe
gcaggtggtggcgagc

SEQ ID NO: 37615 - DNA, 16 bp, Artificial
  oligonucleotide probe
gggtacgcgacgcgag

SEQ ID NO: 37616 - DNA, 16 bp, Artificial
  oligonucleotide probe
gggtacgcgacgcgag

SEQ ID NO: 37617 - DNA, 16 bp, Artificial
  oligonucleotide probe
acgcagcggggtgacg

SEQ ID NO: 37618 - DNA, 16 bp, Artificial
  oligonucleotide probe
acgcagcggggtgacg

SEQ ID NO: 37619 - DNA, 16 bp, Artificial
  oligonucleotide probe
agcgcaccgacgacgc

SEQ ID NO: 37620 - DNA, 16 bp, Artificial
  oligonucleotide probe
agcgcaccgacgacgc

SEQ ID NO: 37621 - DNA, 16 bp, Artificial
  oligonucleotide probe
gagcgacgcgagagcg

SEQ ID NO: 37622 - DNA, 16 bp, Artificial
  oligonucleotide probe
gagcgacgcgagagcg

SEQ ID NO: 37623 - DNA, 16 bp, Artificial
  oligonucleotide probe
cagggcagggtcgggt

SEQ ID NO: 37624 - DNA, 16 bp, Artificial
  oligonucleotide probe
cagggcagggtcgggt

SEQ ID NO: 37625 - DNA, 16 bp, Artificial
  oligonucleotide probe
cgagcaccgagccgga

SEQ ID NO: 37626 - DNA, 16 bp, Artificial
  oligonucleotide probe
cgagcaccgagccgga

SEQ ID NO: 37627 - DNA, 16 bp, Artificial
  oligonucleotide probe
gtgggggtgcagggaa

SEQ ID NO: 37628 - DNA, 16 bp, Artificial
  oligonucleotide probe
gtgggggtgcagggaa

SEQ ID NO: 37629 - DNA, 16 bp, Artificial
  oligonucleotide probe
gtgggggtgcagggaa

SEQ ID NO: 37630 - DNA, 16 bp, Artificial
  oligonucleotide probe
gtgggggtgcagggaa

SEQ ID NO: 37631 - DNA, 16 bp, Artificial
  oligonucleotide probe
cgagcaccgagccgga

SEQ ID NO: 37632 - DNA, 16 bp, Artificial
  oligonucleotide probe
cgagcaccgagccgga

SEQ ID NO: 37633 - DNA, 16 bp, Artificial
  oligonucleotide probe
agcggcgagagcgtcc

SEQ ID NO: 37634 - DNA, 16 bp, Artificial
  oligonucleotide probe
agcggcgagagcgtcc

SEQ ID NO: 37635 - DNA, 16 bp, Artificial
  oligonucleotide probe
tggcaccagcaggggt

SEQ ID NO: 37636 - DNA, 16 bp, Artificial
  oligonucleotide probe
tggcaccagcaggggt

SEQ ID NO: 37637 - DNA, 16 bp, Artificial
  oligonucleotide probe
tggcaccagcaggggt

SEQ ID NO: 37638 - DNA, 16 bp, Artificial
  oligonucleotide probe
tggcaccagcaggggt

SEQ ID NO: 37639 - DNA, 16 bp, Artificial
  oligonucleotide probe
agcggcgagagcgtcc

SEQ ID NO: 37640 - DNA, 16 bp, Artificial
  oligonucleotide probe
agcggcgagagcgtcc

SEQ ID NO: 37641 - DNA, 16 bp, Artificial
  oligonucleotide probe
gcgacctcacgcgcag

SEQ ID NO: 37642 - DNA, 16 bp, Artificial
  oligonucleotide probe
caggcctccctcgcga

SEQ ID NO: 37643 - DNA, 16 bp, Artificial
  oligonucleotide probe
gagcgacgcgagagcg

SEQ ID NO: 37644 - DNA, 16 bp, Artificial
  oligonucleotide probe
acgcagcggggtgacg

SEQ ID NO: 37645 - DNA, 16 bp, Artificial
  oligonucleotide probe
ggaacggaagcggagc

SEQ ID NO: 37646 - DNA, 16 bp, Artificial
  oligonucleotide probe
cagggcagggtcgggt

SEQ ID NO: 37647 - DNA, 16 bp, Artificial
  oligonucleotide probe
gagcgagcagcgggtc

SEQ ID NO: 37648 - DNA, 16 bp, Artificial
  oligonucleotide probe
acgccaccgcctgacg

SEQ ID NO: 37649 - DNA, 16 bp, Artificial
  oligonucleotide probe
gtgggggtgcagggaa

SEQ ID NO: 37650 - DNA, 16 bp, Artificial
  oligonucleotide probe
cctcgtggcggacgga

SEQ ID NO: 37651 - DNA, 16 bp, Artificial
  oligonucleotide probe
agcgcaccgacgacgc

SEQ ID NO: 37652 - DNA, 16 bp, Artificial
  oligonucleotide probe
cggagcctgagcgtgg

SEQ ID NO: 37653 - DNA, 32 bp, Artificial; identical to SEQ ID NO: 5163
  oligonucleotide probe

SEQ ID NO: 37654 - DNA, 32 bp, Artificial; identical to SEQ ID NO: 5163
  oligonucleotide probe

SEQ ID NO: 37655 - DNA, 32 bp, Artificial; identical to SEQ ID NO: 5185
  oligonucleotide probe

SEQ ID NO: 37656 - DNA, 32 bp, Artificial; identical to SEQ ID NO: 5185
  oligonucleotide probe

SEQ ID NO: 37657 - DNA, 32 bp, Artificial; identical to SEQ ID NO: 5195
  oligonucleotide probe

SEQ ID NO: 37658 - DNA, 32 bp, Artificial; identical to SEQ ID NO: 5195
  oligonucleotide probe

SEQ ID NO: 37659 - DNA, 32 bp, Artificial; identical to SEQ ID NO: 5171
  oligonucleotide probe

SEQ ID NO: 37660 - DNA, 32 bp, Artificial; identical to SEQ ID NO: 5171
  oligonucleotide probe

SEQ ID NO: 37661 - DNA, 32 bp, Artificial; identical to SEQ ID NO: 5160
  oligonucleotide probe

SEQ ID NO: 37662 - DNA, 32 bp, Artificial; identical to SEQ ID NO: 5160
  oligonucleotide probe

SEQ ID NO: 37663 - DNA, 32 bp, Artificial; identical to SEQ ID NO: 5195
  oligonucleotide probe

SEQ ID NO: 37664 - DNA, 32 bp, Artificial; identical to SEQ ID NO: 5195
  oligonucleotide probe

SEQ ID NO: 37665 - DNA, 32 bp, Artificial; identical to SEQ ID NO: 5185
  oligonucleotide probe

SEQ ID NO: 37666 - DNA, 32 bp, Artificial; identical to SEQ ID NO: 5185
  oligonucleotide probe

SEQ ID NO: 37667 - DNA, 32 bp, Artificial; identical to SEQ ID NO: 5171
  oligonucleotide probe

SEQ ID NO: 37668 - DNA, 32 bp, Artificial; identical to SEQ ID NO: 5171
  oligonucleotide probe

SEQ ID NO: 37669 - DNA, 32 bp, Artificial; identical to SEQ ID NO: 5137
  oligonucleotide probe

SEQ ID NO: 37670 - DNA, 32 bp, Artificial; identical to SEQ ID NO: 5137
  oligonucleotide probe

SEQ ID NO: 37671 - DNA, 32 bp, Artificial; identical to SEQ ID NO: 5136
  oligonucleotide probe

SEQ ID NO: 37672 - DNA, 32 bp, Artificial; identical to SEQ ID NO: 5136
  oligonucleotide probe

SEQ ID NO: 37673 - DNA, 32 bp, Artificial; identical to SEQ ID NO: 5171
  oligonucleotide probe

SEQ ID NO: 37674 - DNA, 32 bp, Artificial; identical to SEQ ID NO: 5171
  oligonucleotide probe

SEQ ID NO: 37675 - DNA, 32 bp, Artificial; identical to SEQ ID NO: 5195
  oligonucleotide probe

SEQ ID NO: 37676 - DNA, 32 bp, Artificial; identical to SEQ ID NO: 5195
  oligonucleotide probe

SEQ ID NO: 37677 - DNA, 32 bp, Artificial; identical to SEQ ID NO: 5163
  oligonucleotide probe

SEQ ID NO: 37678 - DNA, 32 bp, Artificial; identical to SEQ ID NO: 5163
  oligonucleotide probe

SEQ ID NO: 37679 - DNA, 32 bp, Artificial; identical to SEQ ID NO: 5163
  oligonucleotide probe

SEQ ID NO: 37680 - DNA, 32 bp, Artificial; identical to SEQ ID NO: 5163
  oligonucleotide probe

SEQ ID NO: 37681 - DNA, 32 bp, Artificial; identical to SEQ ID NO: 5160
  oligonucleotide probe

SEQ ID NO: 37682 - DNA, 32 bp, Artificial; identical to SEQ ID NO: 5160
  oligonucleotide probe

SEQ ID NO: 37683 - DNA, 32 bp, Artificial; identical to SEQ ID NO: 5171
  oligonucleotide probe

SEQ ID NO: 37684 - DNA, 32 bp, Artificial; identical to SEQ ID NO: 5171
  oligonucleotide probe

SEQ ID NO: 37685 - DNA, 32 bp, Artificial; identical to SEQ ID NO: 5177
  oligonucleotide probe

SEQ ID NO: 37686 - DNA, 32 bp, Artificial; identical to SEQ ID NO: 5177
  oligonucleotide probe

SEQ ID NO: 37687 - DNA, 32 bp, Artificial; identical to SEQ ID NO: 5141
  oligonucleotide probe

SEQ ID NO: 37688 - DNA, 32 bp, Artificial; identical to SEQ ID NO: 5177
  oligonucleotide probe

SEQ ID NO: 37689 - DNA, 32 bp, Artificial; identical to SEQ ID NO: 5135
  oligonucleotide probe

SEQ ID NO: 37690 - DNA, 32 bp, Artificial; identical to SEQ ID NO: 5135
  oligonucleotide probe

SEQ ID NO: 37691 - DNA, 32 bp, Artificial; identical to SEQ ID NO: 5177
  oligonucleotide probe

SEQ ID NO: 37692 - DNA, 32 bp, Artificial; identical to SEQ ID NO: 5177
  oligonucleotide probe

SEQ ID NO: 37693 - DNA, 32 bp, Artificial; identical to SEQ ID NO: 5137
  oligonucleotide probe

SEQ ID NO: 37694 - DNA, 32 bp, Artificial; identical to SEQ ID NO: 5137
  oligonucleotide probe

SEQ ID NO: 37695 - DNA, 32 bp, Artificial; identical to SEQ ID NO: 5160
  oligonucleotide probe

SEQ ID NO: 37696 - DNA, 32 bp, Artificial; identical to SEQ ID NO: 5160
  oligonucleotide probe

SEQ ID NO: 37697 - DNA, 32 bp, Artificial; identical to SEQ ID NO: 5134
  oligonucleotide probe

SEQ ID NO: 37698 - DNA, 32 bp, Artificial; identical to SEQ ID NO: 5134
  oligonucleotide probe

SEQ ID NO: 37699 - DNA, 32 bp, Artificial; identical to SEQ ID NO: 5160
  oligonucleotide probe

SEQ ID NO: 37700 - DNA, 32 bp, Artificial; identical to SEQ ID NO: 5160
  oligonucleotide probe

SEQ ID NO: 37701 - DNA, 32 bp, Artificial; identical to SEQ ID NO: 5133
  oligonucleotide probe

SEQ ID NO: 37702 - DNA, 32 bp, Artificial; identical to SEQ ID NO: 5133
  oligonucleotide probe

SEQ ID NO: 37703 - DNA, 32 bp, Artificial; identical to SEQ ID NO: 5161
  oligonucleotide probe

SEQ ID NO: 37704 - DNA, 32 bp, Artificial; identical to SEQ ID NO: 5161
  oligonucleotide probe

SEQ ID NO: 37705 - DNA, 32 bp, Artificial; identical to SEQ ID NO: 5171
  oligonucleotide probe

SEQ ID NO: 37706 - DNA, 32 bp, Artificial; identical to SEQ ID NO: 5171
  oligonucleotide probe

SEQ ID NO: 37707 - DNA, 32 bp, Artificial; identical to SEQ ID NO: 5133
  oligonucleotide probe

SEQ ID NO: 37708 - DNA, 32 bp, Artificial; identical to SEQ ID NO: 5133
  oligonucleotide probe

SEQ ID NO: 37709 - DNA, 32 bp, Artificial; identical to SEQ ID NO: 5138
  oligonucleotide probe

SEQ ID NO: 37710 - DNA, 32 bp, Artificial; identical to SEQ ID NO: 5138
  oligonucleotide probe

SEQ ID NO: 37711 - DNA, 32 bp, Artificial; identical to SEQ ID NO: 5195
  oligonucleotide probe

SEQ ID NO: 37712 - DNA, 32 bp, Artificial; identical to SEQ ID NO: 5195
  oligonucleotide probe

SEQ ID NO: 37713 - DNA, 32 bp, Artificial; identical to SEQ ID NO: 5140
  oligonucleotide probe

SEQ ID NO: 37714 - DNA, 32 bp, Artificial; identical to SEQ ID NO: 5140
  oligonucleotide probe

SEQ ID NO: 37715 - DNA, 32 bp, Artificial; identical to SEQ ID NO: 5161
  oligonucleotide probe

SEQ ID NO: 37716 - DNA, 32 bp, Artificial; identical to SEQ ID NO: 5161
  oligonucleotide probe

SEQ ID NO: 37717 - DNA, 32 bp, Artificial; identical to SEQ ID NO: 5185
  oligonucleotide probe

SEQ ID NO: 37718 - DNA, 32 bp, Artificial; identical to SEQ ID NO: 5185
  oligonucleotide probe

SEQ ID NO: 37719 - DNA, 32 bp, Artificial; identical to SEQ ID NO: 5140
  oligonucleotide probe

SEQ ID NO: 37720 - DNA, 32 bp, Artificial; identical to SEQ ID NO: 5140
  oligonucleotide probe

SEQ ID NO: 37721 - DNA, 32 bp, Artificial; identical to SEQ ID NO: 5185
  oligonucleotide probe

SEQ ID NO: 37722 - DNA, 32 bp, Artificial; identical to SEQ ID NO: 5185
  oligonucleotide probe

SEQ ID NO: 37723 - DNA, 32 bp, Artificial; identical to SEQ ID NO: 5163
  oligonucleotide probe

SEQ ID NO: 37724 - DNA, 32 bp, Artificial; identical to SEQ ID NO: 5163
  oligonucleotide probe

SEQ ID NO: 37725 - DNA, 32 bp, Artificial; identical to SEQ ID NO: 5159
  oligonucleotide probe

SEQ ID NO: 37726 - DNA, 32 bp, Artificial; identical to SEQ ID NO: 5159
  oligonucleotide probe

SEQ ID NO: 37727 - DNA, 32 bp, Artificial; identical to SEQ ID NO: 5136
  oligonucleotide probe

SEQ ID NO: 37728 - DNA, 32 bp, Artificial; identical to SEQ ID NO: 5136
  oligonucleotide probe

SEQ ID NO: 37729 - DNA, 32 bp, Artificial; identical to SEQ ID NO: 5141
  oligonucleotide probe

SEQ ID NO: 37730 - DNA, 32 bp, Artificial; identical to SEQ ID NO: 5141
  oligonucleotide probe

SEQ ID NO: 37731 - DNA, 32 bp, Artificial; identical to SEQ ID NO: 5135
  oligonucleotide probe

SEQ ID NO: 37732 - DNA, 32 bp, Artificial; identical to SEQ ID NO: 5135
  oligonucleotide probe

SEQ ID NO: 37733 - DNA, 32 bp, Artificial; identical to SEQ ID NO: 5177
  oligonucleotide probe

SEQ ID NO: 37734 - DNA, 32 bp, Artificial; identical to SEQ ID NO: 5177
  oligonucleotide probe

SEQ ID NO: 37735 - DNA, 32 bp, Artificial; identical to SEQ ID NO: 5136
  oligonucleotide probe

SEQ ID NO: 37736 - DNA, 32 bp, Artificial; identical to SEQ ID NO: 5136
  oligonucleotide probe

SEQ ID NO: 37737 - DNA, 32 bp, Artificial; identical to SEQ ID NO: 5141
  oligonucleotide probe

SEQ ID NO: 37738 - DNA, 32 bp, Artificial; identical to SEQ ID NO: 5141
  oligonucleotide probe

SEQ ID NO: 37739 - DNA, 32 bp, Artificial; identical to SEQ ID NO: 5159
  oligonucleotide probe

SEQ ID NO: 37740 - DNA, 32 bp, Artificial; identical to SEQ ID NO: 5159
  oligonucleotide probe

SEQ ID NO: 37741 - DNA, 32 bp, Artificial; identical to SEQ ID NO: 5241
  oligonucleotide probe

SEQ ID NO: 37742 - DNA, 32 bp, Artificial; identical to SEQ ID NO: 5241
  oligonucleotide probe

SEQ ID NO: 37743 - DNA, 32 bp, Artificial; identical to SEQ ID NO: 5133
  oligonucleotide probe

SEQ ID NO: 37744 - DNA, 32 bp, Artificial; identical to SEQ ID NO: 5133
  oligonucleotide probe

SEQ ID NO: 37745 - DNA, 32 bp, Artificial; identical to SEQ ID NO: 5163
  oligonucleotide probe

SEQ ID NO: 37746 - DNA, 32 bp, Artificial; identical to SEQ ID NO: 5163
  oligonucleotide probe

SEQ ID NO: 37747 - DNA, 32 bp, Artificial; identical to SEQ ID NO: 5141
  oligonucleotide probe

SEQ ID NO: 37748 - DNA, 32 bp, Artificial; identical to SEQ ID NO: 5141
  oligonucleotide probe

SEQ ID NO: 37749 - DNA, 32 bp, Artificial; identical to SEQ ID NO: 5161
  oligonucleotide probe

SEQ ID NO: 37750 - DNA, 32 bp, Artificial; identical to SEQ ID NO: 5161
  oligonucleotide probe

SEQ ID NO: 37751 - DNA, 32 bp, Artificial; identical to SEQ ID NO: 5160
  oligonucleotide probe

SEQ ID NO: 37752 - DNA, 32 bp, Artificial; identical to SEQ ID NO: 5160
  oligonucleotide probe

SEQ ID NO: 37753 - DNA, 32 bp, Artificial; identical to SEQ ID NO: 5137
  oligonucleotide probe

SEQ ID NO: 37754 - DNA, 32 bp, Artificial; identical to SEQ ID NO: 5137
  oligonucleotide probe

SEQ ID NO: 37755 - DNA, 32 bp, Artificial; identical to SEQ ID NO: 5138
  oligonucleotide probe

SEQ ID NO: 37756 - DNA, 32 bp, Artificial; identical to SEQ ID NO: 5138
  oligonucleotide probe

SEQ ID NO: 37757 - DNA, 32 bp, Artificial; identical to SEQ ID NO: 5159
  oligonucleotide probe

SEQ ID NO: 37758 - DNA, 32 bp, Artificial; identical to SEQ ID NO: 5159
  oligonucleotide probe

SEQ ID NO: 37759 - DNA, 32 bp, Artificial; identical to SEQ ID NO: 5185
  oligonucleotide probe

SEQ ID NO: 37760 - DNA, 32 bp, Artificial; identical to SEQ ID NO: 5185
  oligonucleotide probe

SEQ ID NO: 37761 - DNA, 32 bp, Artificial; identical to SEQ ID NO: 5195
  oligonucleotide probe

SEQ ID NO: 37762 - DNA, 32 bp, Artificial; identical to SEQ ID NO: 5195
  oligonucleotide probe

SEQ ID NO: 37763 - DNA, 32 bp, Artificial; identical to SEQ ID NO: 5171
  oligonucleotide probe

SEQ ID NO: 37764 - DNA, 32 bp, Artificial; identical to SEQ ID NO: 5171
  oligonucleotide probe

SEQ ID NO: 37765 - DNA, 32 bp, Artificial; identical to SEQ ID NO: 5160
  oligonucleotide probe

SEQ ID NO: 37766 - DNA, 32 bp, Artificial; identical to SEQ ID NO: 5160
  oligonucleotide probe

SEQ ID NO: 37767 - DNA, 32 bp, Artificial; identical to SEQ ID NO: 5160
  oligonucleotide probe

SEQ ID NO: 37768 - DNA, 32 bp, Artificial; identical to SEQ ID NO: 5160
  oligonucleotide probe

SEQ ID NO: 37769 - DNA, 32 bp, Artificial; identical to SEQ ID NO: 5133
  oligonucleotide probe

SEQ ID NO: 37770 - DNA, 32 bp, Artificial; identical to SEQ ID NO: 5133
  oligonucleotide probe

SEQ ID NO: 37771 - DNA, 32 bp, Artificial; identical to SEQ ID NO: 5159
  oligonucleotide probe

SEQ ID NO: 37772 - DNA, 32 bp, Artificial; identical to SEQ ID NO: 5159
  oligonucleotide probe

SEQ ID NO: 37773 - DNA, 32 bp, Artificial; identical to SEQ ID NO: 5138
  oligonucleotide probe

SEQ ID NO: 37774 - DNA, 32 bp, Artificial; identical to SEQ ID NO: 5138
  oligonucleotide probe

SEQ ID NO: 37775 - DNA, 32 bp, Artificial; identical to SEQ ID NO: 5161
  oligonucleotide probe

SEQ ID NO: 37776 - DNA, 32 bp, Artificial; identical to SEQ ID NO: 5161
  oligonucleotide probe

SEQ ID NO: 37777 - DNA, 32 bp, Artificial; identical to SEQ ID NO: 5140
  oligonucleotide probe

SEQ ID NO: 37778 - DNA, 32 bp, Artificial; identical to SEQ ID NO: 5140
  oligonucleotide probe

SEQ ID NO: 37779 - DNA, 32 bp, Artificial; identical to SEQ ID NO: 5163
  oligonucleotide probe

SEQ ID NO: 37780 - DNA, 32 bp, Artificial; identical to SEQ ID NO: 5163
  oligonucleotide probe

SEQ ID NO: 37781 - DNA, 32 bp, Artificial; identical to SEQ ID NO: 5141
  oligonucleotide probe

SEQ ID NO: 37782 - DNA, 32 bp, Artificial; identical to SEQ ID NO: 5141
  oligonucleotide probe

SEQ ID NO: 37783 - DNA, 32 bp, Artificial; identical to SEQ ID NO: 5136
  oligonucleotide probe

SEQ ID NO: 37784 - DNA, 32 bp, Artificial; identical to SEQ ID NO: 5136
  oligonucleotide probe

SEQ ID NO: 37785 - DNA, 32 bp, Artificial; identical to SEQ ID NO: 5239
  oligonucleotide probe

SEQ ID NO: 37786 - DNA, 32 bp, Artificial; identical to SEQ ID NO: 5239
  oligonucleotide probe

SEQ ID NO: 37787 - DNA, 32 bp, Artificial; identical to SEQ ID NO: 5138
  oligonucleotide probe

SEQ ID NO: 37788 - DNA, 32 bp, Artificial; identical to SEQ ID NO: 5138
  oligonucleotide probe

SEQ ID NO: 37789 - DNA, 32 bp, Artificial; identical to SEQ ID NO: 5241
  oligonucleotide probe

SEQ ID NO: 37790 - DNA, 32 bp, Artificial; identical to SEQ ID NO: 5241
  oligonucleotide probe

SEQ ID NO: 37791 - DNA, 32 bp, Artificial; identical to SEQ ID NO: 5195
  oligonucleotide probe

SEQ ID NO: 37792 - DNA, 32 bp, Artificial; identical to SEQ ID NO: 5195
  oligonucleotide probe

SEQ ID NO: 37793 - DNA, 32 bp, Artificial; identical to SEQ ID NO: 5185
  oligonucleotide probe

SEQ ID NO: 37794 - DNA, 32 bp, Artificial; identical to SEQ ID NO: 5185
  oligonucleotide probe

SEQ ID NO: 37795 - DNA, 32 bp, Artificial; identical to SEQ ID NO: 5231
  oligonucleotide probe

SEQ ID NO: 37796 - DNA, 32 bp, Artificial; identical to SEQ ID NO: 5231
  oligonucleotide probe

SEQ ID NO: 37797 - DNA, 32 bp, Artificial; identical to SEQ ID NO: 5140
  oligonucleotide probe

SEQ ID NO: 37798 - DNA, 32 bp, Artificial; identical to SEQ ID NO: 5140
  oligonucleotide probe

SEQ ID NO: 37799 - DNA, 32 bp, Artificial; identical to SEQ ID NO: 5229
  oligonucleotide probe

SEQ ID NO: 37800 - DNA, 32 bp, Artificial; identical to SEQ ID NO: 5229
  oligonucleotide probe

SEQ ID NO: 37801 - DNA, 32 bp, Artificial; identical to SEQ ID NO: 5177
  oligonucleotide probe

SEQ ID NO: 37802 - DNA, 32 bp, Artificial; identical to SEQ ID NO: 5177
  oligonucleotide probe

SEQ ID NO: 37803 - DNA, 32 bp, Artificial; identical to SEQ ID NO: 5163
  oligonucleotide probe

SEQ ID NO: 37804 - DNA, 32 bp, Artificial; identical to SEQ ID NO: 5163
  oligonucleotide probe

SEQ ID NO: 37805 - DNA, 32 bp, Artificial; identical to SEQ ID NO: 5137
  oligonucleotide probe

SEQ ID NO: 37806 - DNA, 32 bp, Artificial; identical to SEQ ID NO: 5137
  oligonucleotide probe

SEQ ID NO: 37807 - DNA, 32 bp, Artificial; identical to SEQ ID NO: 5134
  oligonucleotide probe

SEQ ID NO: 37808 - DNA, 32 bp, Artificial; identical to SEQ ID NO: 5134
  oligonucleotide probe

SEQ ID NO: 37809 - DNA, 32 bp, Artificial; identical to SEQ ID NO: 5171
  oligonucleotide probe

SEQ ID NO: 37810 - DNA, 32 bp, Artificial; identical to SEQ ID NO: 5171
  oligonucleotide probe

SEQ ID NO: 37811 - DNA, 32 bp, Artificial; identical to SEQ ID NO: 5138
  oligonucleotide probe

SEQ ID NO: 37812 - DNA, 32 bp, Artificial; identical to SEQ ID NO: 5138
  oligonucleotide probe

SEQ ID NO: 37813 - DNA, 32 bp, Artificial; identical to SEQ ID NO: 5177
  oligonucleotide probe

SEQ ID NO: 37814 - DNA, 32 bp, Artificial; identical to SEQ ID NO: 5177
  oligonucleotide probe

SEQ ID NO: 37815 - DNA, 32 bp, Artificial; identical to SEQ ID NO: 5135
  oligonucleotide probe

SEQ ID NO: 37816 - DNA, 32 bp, Artificial; identical to SEQ ID NO: 5135
  oligonucleotide probe

SEQ ID NO: 37817 - DNA, 32 bp, Artificial; identical to SEQ ID NO: 5171
  oligonucleotide probe

SEQ ID NO: 37818 - DNA, 32 bp, Artificial; identical to SEQ ID NO: 5171
  oligonucleotide probe

SEQ ID NO: 37819 - DNA, 32 bp, Artificial; identical to SEQ ID NO: 5171
  oligonucleotide probe

SEQ ID NO: 37820 - DNA, 32 bp, Artificial; identical to SEQ ID NO: 5171
  oligonucleotide probe

SEQ ID NO: 37821 - DNA, 32 bp, Artificial; identical to SEQ ID NO: 5185
  oligonucleotide probe

SEQ ID NO: 37822 - DNA, 32 bp, Artificial; identical to SEQ ID NO: 5185
  oligonucleotide probe

SEQ ID NO: 37823 - DNA, 32 bp, Artificial; identical to SEQ ID NO: 5195
  oligonucleotide probe

SEQ ID NO: 37824 - DNA, 32 bp, Artificial; identical to SEQ ID NO: 5195
  oligonucleotide probe

SEQ ID NO: 37825 - DNA, 32 bp, Artificial; identical to SEQ ID NO: 5177
  oligonucleotide probe

SEQ ID NO: 37826 - DNA, 32 bp, Artificial; identical to SEQ ID NO: 5177
  oligonucleotide probe

SEQ ID NO: 37827 - DNA, 32 bp, Artificial; identical to SEQ ID NO: 5171
  oligonucleotide probe

SEQ ID NO: 37828 - DNA, 32 bp, Artificial; identical to SEQ ID NO: 5171
  oligonucleotide probe

SEQ ID NO: 37829 - DNA, 32 bp, Artificial; identical to SEQ ID NO: 5134
  oligonucleotide probe

SEQ ID NO: 37830 - DNA, 32 bp, Artificial; identical to SEQ ID NO: 5134
  oligonucleotide probe

SEQ ID NO: 37831 - DNA, 32 bp, Artificial; identical to SEQ ID NO: 5137
  oligonucleotide probe

SEQ ID NO: 37832 - DNA, 32 bp, Artificial; identical to SEQ ID NO: 5137
  oligonucleotide probe

SEQ ID NO: 37833 - DNA, 32 bp, Artificial; identical to SEQ ID NO: 5160
  oligonucleotide probe

SEQ ID NO: 37834 - DNA, 32 bp, Artificial; identical to SEQ ID NO: 5160
  oligonucleotide probe

SEQ ID NO: 37835 - DNA, 32 bp, Artificial; identical to SEQ ID NO: 5410
  oligonucleotide probe

SEQ ID NO: 37836 - DNA, 32 bp, Artificial; identical to SEQ ID NO: 5410
  oligonucleotide probe

SEQ ID NO: 37837 - DNA, 32 bp, Artificial; identical to SEQ ID NO: 5410
  oligonucleotide probe

SEQ ID NO: 37838 - DNA, 32 bp, Artificial; identical to SEQ ID NO: 5410
  oligonucleotide probe

SEQ ID NO: 37839 - DNA, 32 bp, Artificial; identical to SEQ ID NO: 5140
  oligonucleotide probe

SEQ ID NO: 37840 - DNA, 32 bp, Artificial; identical to SEQ ID NO: 5140
  oligonucleotide probe

SEQ ID NO: 37841 - DNA, 32 bp, Artificial; identical to SEQ ID NO: 5416
  oligonucleotide probe

SEQ ID NO: 37842 - DNA, 32 bp, Artificial; identical to SEQ ID NO: 5416
  oligonucleotide probe

SEQ ID NO: 37843 - DNA, 32 bp, Artificial; identical to SEQ ID NO: 5133
  oligonucleotide probe

SEQ ID NO: 37844 - DNA, 32 bp, Artificial; identical to SEQ ID NO: 5133
  oligonucleotide probe

SEQ ID NO: 37845 - DNA, 32 bp, Artificial; identical to SEQ ID NO: 5159
  oligonucleotide probe

SEQ ID NO: 37846 - DNA, 32 bp, Artificial; identical to SEQ ID NO: 5159
  oligonucleotide probe

SEQ ID NO: 37847 - DNA, 32 bp, Artificial; identical to SEQ ID NO: 5136
  oligonucleotide probe

SEQ ID NO: 37848 - DNA, 32 bp, Artificial; identical to SEQ ID NO: 5136
  oligonucleotide probe

SEQ ID NO: 37849 - DNA, 32 bp, Artificial; identical to SEQ ID NO: 5185
  oligonucleotide probe

SEQ ID NO: 37850 - DNA, 32 bp, Artificial; identical to SEQ ID NO: 5185
  oligonucleotide probe

SEQ ID NO: 37851 - DNA, 32 bp, Artificial; identical to SEQ ID NO: 5177
  oligonucleotide probe

SEQ ID NO: 37852 - DNA, 32 bp, Artificial; identical to SEQ ID NO: 5177
  oligonucleotide probe

SEQ ID NO: 37853 - DNA, 32 bp, Artificial; identical to SEQ ID NO: 5141
  oligonucleotide probe

SEQ ID NO: 37854 - DNA, 32 bp, Artificial; identical to SEQ ID NO: 5141
  oligonucleotide probe

SEQ ID NO: 37855 - DNA, 32 bp, Artificial; identical to SEQ ID NO: 5140
  oligonucleotide probe

SEQ ID NO: 37856 - DNA, 32 bp, Artificial; identical to SEQ ID NO: 5140
  oligonucleotide probe

SEQ ID NO: 37857 - DNA, 32 bp, Artificial; identical to SEQ ID NO: 5135
  oligonucleotide probe

SEQ ID NO: 37858 - DNA, 32 bp, Artificial; identical to SEQ ID NO: 5135
  oligonucleotide probe

SEQ ID NO: 37859 - DNA, 32 bp, Artificial; identical to SEQ ID NO: 5163
  oligonucleotide probe

SEQ ID NO: 37860 - DNA, 32 bp, Artificial; identical to SEQ ID NO: 5163
  oligonucleotide probe

SEQ ID NO: 37861 - DNA, 32 bp, Artificial; identical to SEQ ID NO: 5177
  oligonucleotide probe

SEQ ID NO: 37862 - DNA, 32 bp, Artificial; identical to SEQ ID NO: 5177
  oligonucleotide probe

SEQ ID NO: 37863 - DNA, 32 bp, Artificial; identical to SEQ ID NO: 5185
  oligonucleotide probe

SEQ ID NO: 37864 - DNA, 32 bp, Artificial; identical to SEQ ID NO: 5185
  oligonucleotide probe

SEQ ID NO: 37865 - DNA, 32 bp, Artificial; identical to SEQ ID NO: 5171
  oligonucleotide probe

SEQ ID NO: 37866 - DNA, 32 bp, Artificial; identical to SEQ ID NO: 5171
  oligonucleotide probe

SEQ ID NO: 37867 - DNA, 32 bp, Artificial; identical to SEQ ID NO: 5163
  oligonucleotide probe

SEQ ID NO: 37868 - DNA, 32 bp, Artificial; identical to SEQ ID NO: 5163
  oligonucleotide probe

SEQ ID NO: 37869 - DNA, 32 bp, Artificial; identical to SEQ ID NO: 5177
  oligonucleotide probe

SEQ ID NO: 37870 - DNA, 32 bp, Artificial; identical to SEQ ID NO: 5177
  oligonucleotide probe

SEQ ID NO: 37871 - DNA, 32 bp, Artificial; identical to SEQ ID NO: 5137
  oligonucleotide probe

SEQ ID NO: 37872 - DNA, 32 bp, Artificial; identical to SEQ ID NO: 5137
  oligonucleotide probe

SEQ ID NO: 37873 - DNA, 32 bp, Artificial; identical to SEQ ID NO: 5195
  oligonucleotide probe

SEQ ID NO: 37874 - DNA, 32 bp, Artificial; identical to SEQ ID NO: 5195
  oligonucleotide probe

SEQ ID NO: 37875 - DNA, 32 bp, Artificial; identical to SEQ ID NO: 5160
  oligonucleotide probe

SEQ ID NO: 37876 - DNA, 32 bp, Artificial; identical to SEQ ID NO: 5160
  oligonucleotide probe

SEQ ID NO: 37877 - DNA, 32 bp, Artificial; identical to SEQ ID NO: 5135
  oligonucleotide probe

SEQ ID NO: 37878 - DNA, 32 bp, Artificial; identical to SEQ ID NO: 5135
  oligonucleotide probe

SEQ ID NO: 37879 - DNA, 32 bp, Artificial; identical to SEQ ID NO: 5137
  oligonucleotide probe

SEQ ID NO: 37880 - DNA, 32 bp, Artificial; identical to SEQ ID NO: 5137
  oligonucleotide probe

SEQ ID NO: 37881 - DNA, 32 bp, Artificial; identical to SEQ ID NO: 5159
  oligonucleotide probe

SEQ ID NO: 37882 - DNA, 32 bp, Artificial; identical to SEQ ID NO: 5159
  oligonucleotide probe

SEQ ID NO: 37883 - DNA, 32 bp, Artificial; identical to SEQ ID NO: 5185
  oligonucleotide probe

SEQ ID NO: 37884 - DNA, 32 bp, Artificial; identical to SEQ ID NO: 5185
  oligonucleotide probe

SEQ ID NO: 37885 - DNA, 32 bp, Artificial; identical to SEQ ID NO: 5171
  oligonucleotide probe

SEQ ID NO: 37886 - DNA, 32 bp, Artificial; identical to SEQ ID NO: 5171
  oligonucleotide probe

SEQ ID NO: 37887 - DNA, 32 bp, Artificial; identical to SEQ ID NO: 5253
  oligonucleotide probe

SEQ ID NO: 37888 - DNA, 32 bp, Artificial; identical to SEQ ID NO: 5253
  oligonucleotide probe

SEQ ID NO: 37889 - DNA, 32 bp, Artificial; identical to SEQ ID NO: 5195
  oligonucleotide probe

SEQ ID NO: 37890 - DNA, 32 bp, Artificial; identical to SEQ ID NO: 5195
  oligonucleotide probe

SEQ ID NO: 37891 - DNA, 32 bp, Artificial; identical to SEQ ID NO: 5159
  oligonucleotide probe

SEQ ID NO: 37892 - DNA, 32 bp, Artificial; identical to SEQ ID NO: 5159
  oligonucleotide probe

SEQ ID NO: 37893 - DNA, 32 bp, Artificial; identical to SEQ ID NO: 5161
  oligonucleotide probe

SEQ ID NO: 37894 - DNA, 32 bp, Artificial; identical to SEQ ID NO: 5161
  oligonucleotide probe

SEQ ID NO: 37895 - DNA, 32 bp, Artificial; identical to SEQ ID NO: 5171
  oligonucleotide probe

SEQ ID NO: 37896 - DNA, 32 bp, Artificial; identical to SEQ ID NO: 5171
  oligonucleotide probe

SEQ ID NO: 37897 - DNA, 32 bp, Artificial; identical to SEQ ID NO: 5141
  oligonucleotide probe

SEQ ID NO: 37898 - DNA, 32 bp, Artificial; identical to SEQ ID NO: 5141
  oligonucleotide probe

SEQ ID NO: 37899 - DNA, 32 bp, Artificial; identical to SEQ ID NO: 5185
  oligonucleotide probe

SEQ ID NO: 37900 - DNA, 32 bp, Artificial; identical to SEQ ID NO: 5185
  oligonucleotide probe

SEQ ID NO: 37901 - DNA, 32 bp, Artificial; identical to SEQ ID NO: 5133
  oligonucleotide probe

SEQ ID NO: 37902 - DNA, 32 bp, Artificial; identical to SEQ ID NO: 5133
  oligonucleotide probe

SEQ ID NO: 37903 - DNA, 32 bp, Artificial; identical to SEQ ID NO: 5163
  oligonucleotide probe

SEQ ID NO: 37904 - DNA, 32 bp, Artificial; identical to SEQ ID NO: 5163
  oligonucleotide probe

SEQ ID NO: 37905 - DNA, 32 bp, Artificial; identical to SEQ ID NO: 5161
  oligonucleotide probe

SEQ ID NO: 37906 - DNA, 32 bp, Artificial; identical to SEQ ID NO: 5161
  oligonucleotide probe

SEQ ID NO: 37907 - DNA, 32 bp, Artificial; identical to SEQ ID NO: 5195
  oligonucleotide probe

SEQ ID NO: 37908 - DNA, 32 bp, Artificial; identical to SEQ ID NO: 5195
  oligonucleotide probe

SEQ ID NO: 37909 - DNA, 32 bp, Artificial; identical to SEQ ID NO: 5134
  oligonucleotide probe

SEQ ID NO: 37910 - DNA, 32 bp, Artificial; identical to SEQ ID NO: 5134
  oligonucleotide probe

SEQ ID NO: 37911 - DNA, 32 bp, Artificial; identical to SEQ ID NO: 5195
  oligonucleotide probe

SEQ ID NO: 37912 - DNA, 32 bp, Artificial; identical to SEQ ID NO: 5195
  oligonucleotide probe

SEQ ID NO: 37913 - DNA, 32 bp, Artificial; identical to SEQ ID NO: 5161
  oligonucleotide probe

SEQ ID NO: 37914 - DNA, 32 bp, Artificial; identical to SEQ ID NO: 5161
  oligonucleotide probe

SEQ ID NO: 37915 - DNA, 32 bp, Artificial; identical to SEQ ID NO: 5416
  oligonucleotide probe

SEQ ID NO: 37916 - DNA, 32 bp, Artificial; identical to SEQ ID NO: 5416
  oligonucleotide probe

SEQ ID NO: 37917 - DNA, 32 bp, Artificial; identical to SEQ ID NO: 5219
  oligonucleotide probe

SEQ ID NO: 37918 - DNA, 32 bp, Artificial; identical to SEQ ID NO: 5219
  oligonucleotide probe

SEQ ID NO: 37919 - DNA, 32 bp, Artificial; identical to SEQ ID NO: 5219
  oligonucleotide probe

SEQ ID NO: 37920 - DNA, 32 bp, Artificial; identical to SEQ ID NO: 5219
  oligonucleotide probe

SEQ ID NO: 37921 - DNA, 32 bp, Artificial; identical to SEQ ID NO: 5410
  oligonucleotide probe

SEQ ID NO: 37922 - DNA, 32 bp, Artificial; identical to SEQ ID NO: 5229
  oligonucleotide probe

SEQ ID NO: 37923 - DNA, 32 bp, Artificial; identical to SEQ ID NO: 5239
  oligonucleotide probe

SEQ ID NO: 37924 - DNA, 32 bp, Artificial; identical to SEQ ID NO: 5223
  oligonucleotide probe

SEQ ID NO: 37925 - DNA, 32 bp, Artificial; identical to SEQ ID NO: 5217
  oligonucleotide probe

SEQ ID NO: 37926 - DNA, 32 bp, Artificial; identical to SEQ ID NO: 5218
  oligonucleotide probe

SEQ ID NO: 37927 - DNA, 32 bp, Artificial; identical to SEQ ID NO: 5218
  oligonucleotide probe

SEQ ID NO: 37928 - DNA, 32 bp, Artificial; identical to SEQ ID NO: 5253
  oligonucleotide probe

SEQ ID NO: 37929 - DNA, 32 bp, Artificial; identical to SEQ ID NO: 5253
  oligonucleotide probe

SEQ ID NO: 37930 - DNA, 32 bp, Artificial; identical to SEQ ID NO: 5161
  oligonucleotide probe

SEQ ID NO: 37931 - DNA, 32 bp, Artificial; identical to SEQ ID NO: 5161
  oligonucleotide probe

SEQ ID NO: 37932 - DNA, 32 bp, Artificial; identical to SEQ ID NO: 5133
  oligonucleotide probe

SEQ ID NO: 37933 - DNA, 32 bp, Artificial; identical to SEQ ID NO: 5133
  oligonucleotide probe

SEQ ID NO: 37934 - DNA, 32 bp, Artificial; identical to SEQ ID NO: 5399
  oligonucleotide probe

SEQ ID NO: 37935 - DNA, 32 bp, Artificial; identical to SEQ ID NO: 5399
  oligonucleotide probe

SEQ ID NO: 37936 - DNA, 32 bp, Artificial; identical to SEQ ID NO: 5185
  oligonucleotide probe

SEQ ID NO: 37937 - DNA, 32 bp, Artificial; identical to SEQ ID NO: 5185
  oligonucleotide probe

SEQ ID NO: 37938 - DNA, 32 bp, Artificial; identical to SEQ ID NO: 5232
  oligonucleotide probe

SEQ ID NO: 37939 - DNA, 32 bp, Artificial; identical to SEQ ID NO: 5232
  oligonucleotide probe

SEQ ID NO: 37940 - DNA, 32 bp, Artificial; identical to SEQ ID NO: 5136
  oligonucleotide probe

SEQ ID NO: 37941 - DNA, 32 bp, Artificial; identical to SEQ ID NO: 5136
  oligonucleotide probe

SEQ ID NO: 37942 - DNA, 32 bp, Artificial; identical to SEQ ID NO: 5221
  oligonucleotide probe

SEQ ID NO: 37943 - DNA, 32 bp, Artificial; identical to SEQ ID NO: 5221
  oligonucleotide probe

SEQ ID NO: 37944 - DNA, 32 bp, Artificial; identical to SEQ ID NO: 5195
  oligonucleotide probe

SEQ ID NO: 37945 - DNA, 32 bp, Artificial; identical to SEQ ID NO: 5195
  oligonucleotide probe

SEQ ID NO: 37946 - DNA, 32 bp, Artificial; identical to SEQ ID NO: 5416
  oligonucleotide probe

SEQ ID NO: 37947 - DNA, 32 bp, Artificial; identical to SEQ ID NO: 5416
  oligonucleotide probe

SEQ ID NO: 37948 - DNA, 32 bp, Artificial; identical to SEQ ID NO: 5241
  oligonucleotide probe

SEQ ID NO: 37949 - DNA, 32 bp, Artificial; identical to SEQ ID NO: 5241
  oligonucleotide probe

SEQ ID NO: 37950 - DNA, 32 bp, Artificial; identical to SEQ ID NO: 5239
  oligonucleotide probe

SEQ ID NO: 37951 - DNA, 32 bp, Artificial; identical to SEQ ID NO: 5239
  oligonucleotide probe

SEQ ID NO: 37952 - DNA, 32 bp, Artificial; identical to SEQ ID NO: 5222
  oligonucleotide probe

SEQ ID NO: 37953 - DNA, 32 bp, Artificial; identical to SEQ ID NO: 5222
  oligonucleotide probe

SEQ ID NO: 37954 - DNA, 32 bp, Artificial; identical to SEQ ID NO: 5135
  oligonucleotide probe

SEQ ID NO: 37955 - DNA, 32 bp, Artificial; identical to SEQ ID NO: 5135
  oligonucleotide probe

SEQ ID NO: 37956 - DNA, 32 bp, Artificial; identical to SEQ ID NO: 5229
  oligonucleotide probe

SEQ ID NO: 37957 - DNA, 32 bp, Artificial; identical to SEQ ID NO: 5229
  oligonucleotide probe

SEQ ID NO: 37958 - DNA, 32 bp, Artificial; identical to SEQ ID NO: 5217
  oligonucleotide probe

SEQ ID NO: 37959 - DNA, 32 bp, Artificial; identical to SEQ ID NO: 5217
  oligonucleotide probe

SEQ ID NO: 37960 - DNA, 32 bp, Artificial; identical to SEQ ID NO: 5224
  oligonucleotide probe

SEQ ID NO: 37961 - DNA, 32 bp, Artificial; identical to SEQ ID NO: 5224
  oligonucleotide probe

SEQ ID NO: 37962 - DNA, 32 bp, Artificial; identical to SEQ ID NO: 5253
  oligonucleotide probe

SEQ ID NO: 37963 - DNA, 32 bp, Artificial; identical to SEQ ID NO: 5253
  oligonucleotide probe

SEQ ID NO: 37964 - DNA, 32 bp, Artificial; identical to SEQ ID NO: 5399
  oligonucleotide probe

SEQ ID NO: 37965 - DNA, 32 bp, Artificial; identical to SEQ ID NO: 5399
  oligonucleotide probe

SEQ ID NO: 37966 - DNA, 32 bp, Artificial; identical to SEQ ID NO: 5411
  oligonucleotide probe

SEQ ID NO: 37967 - DNA, 32 bp, Artificial; identical to SEQ ID NO: 5411
  oligonucleotide probe

SEQ ID NO: 37968 - DNA, 32 bp, Artificial; identical to SEQ ID NO: 5134
  oligonucleotide probe

SEQ ID NO: 37969 - DNA, 32 bp, Artificial; identical to SEQ ID NO: 5134
  oligonucleotide probe

SEQ ID NO: 37970 - DNA, 32 bp, Artificial; identical to SEQ ID NO: 5242
  oligonucleotide probe

SEQ ID NO: 37971 - DNA, 32 bp, Artificial; identical to SEQ ID NO: 5242
  oligonucleotide probe

SEQ ID NO: 37972 - DNA, 32 bp, Artificial; identical to SEQ ID NO: 5221
  oligonucleotide probe

SEQ ID NO: 37973 - DNA, 32 bp, Artificial; identical to SEQ ID NO: 5221
  oligonucleotide probe

SEQ ID NO: 37974 - DNA, 32 bp, Artificial; identical to SEQ ID NO: 5141
  oligonucleotide probe

SEQ ID NO: 37975 - DNA, 32 bp, Artificial; identical to SEQ ID NO: 5141
  oligonucleotide probe

SEQ ID NO: 37976 - DNA, 32 bp, Artificial; identical to SEQ ID NO: 5411
  oligonucleotide probe

SEQ ID NO: 37977 - DNA, 32 bp, Artificial; identical to SEQ ID NO: 5411
  oligonucleotide probe

SEQ ID NO: 37978 - DNA, 32 bp, Artificial; identical to SEQ ID NO: 5163
  oligonucleotide probe

SEQ ID NO: 37979 - DNA, 32 bp, Artificial; identical to SEQ ID NO: 5163
  oligonucleotide probe

SEQ ID NO: 37980 - DNA, 32 bp, Artificial; identical to SEQ ID NO: 5253
  oligonucleotide probe

SEQ ID NO: 37981 - DNA, 32 bp, Artificial; identical to SEQ ID NO: 5222
  oligonucleotide probe

SEQ ID NO: 37982 - DNA, 32 bp, Artificial; identical to SEQ ID NO: 5232
  oligonucleotide probe

SEQ ID NO: 37983 - DNA, 32 bp, Artificial; identical to SEQ ID NO: 5232
  oligonucleotide probe

SEQ ID NO: 37984 - DNA, 32 bp, Artificial; identical to SEQ ID NO: 5160
  oligonucleotide probe

SEQ ID NO: 37985 - DNA, 32 bp, Artificial; identical to SEQ ID NO: 5160
  oligonucleotide probe

SEQ ID NO: 37986 - DNA, 32 bp, Artificial; identical to SEQ ID NO: 5218
  oligonucleotide probe

SEQ ID NO: 37987 - DNA, 32 bp, Artificial; identical to SEQ ID NO: 5218
  oligonucleotide probe

SEQ ID NO: 37988 - DNA, 32 bp, Artificial; identical to SEQ ID NO: 5240
  oligonucleotide probe

SEQ ID NO: 37989 - DNA, 32 bp, Artificial; identical to SEQ ID NO: 5240
  oligonucleotide probe

SEQ ID NO: 37990 - DNA, 32 bp, Artificial; identical to SEQ ID NO: 5231
  oligonucleotide probe

SEQ ID NO: 37991 - DNA, 32 bp, Artificial; identical to SEQ ID NO: 5231
  oligonucleotide probe

SEQ ID NO: 37992 - DNA, 32 bp, Artificial; identical to SEQ ID NO: 5217
  oligonucleotide probe

SEQ ID NO: 37993 - DNA, 32 bp, Artificial; identical to SEQ ID NO: 5217
  oligonucleotide probe

SEQ ID NO: 37994 - DNA, 32 bp, Artificial; identical to SEQ ID NO: 5240
  oligonucleotide probe

SEQ ID NO: 37995 - DNA, 32 bp, Artificial; identical to SEQ ID NO: 5240
  oligonucleotide probe

SEQ ID NO: 37996 - DNA, 32 bp, Artificial; identical to SEQ ID NO: 5416
  oligonucleotide probe

SEQ ID NO: 37997 - DNA, 32 bp, Artificial; identical to SEQ ID NO: 5416
  oligonucleotide probe

SEQ ID NO: 37998 - DNA, 32 bp, Artificial; identical to SEQ ID NO: 5137
  oligonucleotide probe

SEQ ID NO: 37999 - DNA, 32 bp, Artificial; identical to SEQ ID NO: 5137
  oligonucleotide probe

SEQ ID NO: 38000 - DNA, 32 bp, Artificial; identical to SEQ ID NO: 5219
  oligonucleotide probe

SEQ ID NO: 38001 - DNA, 32 bp, Artificial; identical to SEQ ID NO: 5219
  oligonucleotide probe

SEQ ID NO: 38002 - DNA, 32 bp, Artificial; identical to SEQ ID NO: 5138
  oligonucleotide probe

SEQ ID NO: 38003 - DNA, 32 bp, Artificial; identical to SEQ ID NO: 5138
  oligonucleotide probe

SEQ ID NO: 38004 - DNA, 32 bp, Artificial; identical to SEQ ID NO: 5231
  oligonucleotide probe

SEQ ID NO: 38005 - DNA, 32 bp, Artificial; identical to SEQ ID NO: 5231
  oligonucleotide probe

SEQ ID NO: 38006 - DNA, 32 bp, Artificial; identical to SEQ ID NO: 5220
  oligonucleotide probe

SEQ ID NO: 38007 - DNA, 32 bp, Artificial; identical to SEQ ID NO: 5220
  oligonucleotide probe

SEQ ID NO: 38008 - DNA, 32 bp, Artificial; identical to SEQ ID NO: 5239
  oligonucleotide probe

SEQ ID NO: 38009 - DNA, 32 bp, Artificial; identical to SEQ ID NO: 5239
  oligonucleotide probe

SEQ ID NO: 38010 - DNA, 32 bp, Artificial; identical to SEQ ID NO: 5159
  oligonucleotide probe

SEQ ID NO: 38011 - DNA, 32 bp, Artificial; identical to SEQ ID NO: 5159
  oligonucleotide probe

SEQ ID NO: 38012 - DNA, 32 bp, Artificial; identical to SEQ ID NO: 5241
  oligonucleotide probe

SEQ ID NO: 38013 - DNA, 32 bp, Artificial; identical to SEQ ID NO: 5241
  oligonucleotide probe

SEQ ID NO: 38014 - DNA, 32 bp, Artificial; identical to SEQ ID NO: 5177
  oligonucleotide probe

SEQ ID NO: 38015 - DNA, 32 bp, Artificial; identical to SEQ ID NO: 5177
  oligonucleotide probe

SEQ ID NO: 38016 - DNA, 32 bp, Artificial; identical to SEQ ID NO: 5223
  oligonucleotide probe

SEQ ID NO: 38017 - DNA, 32 bp, Artificial; identical to SEQ ID NO: 5223
  oligonucleotide probe

SEQ ID NO: 38018 - DNA, 32 bp, Artificial; identical to SEQ ID NO: 5224
  oligonucleotide probe

SEQ ID NO: 38019 - DNA, 32 bp, Artificial; identical to SEQ ID NO: 5224
  oligonucleotide probe

SEQ ID NO: 38020 - DNA, 32 bp, Artificial; identical to SEQ ID NO: 5242
  oligonucleotide probe

SEQ ID NO: 38021 - DNA, 32 bp, Artificial; identical to SEQ ID NO: 5242
  oligonucleotide probe

SEQ ID NO: 38022 - DNA, 32 bp, Artificial; identical to SEQ ID NO: 5229
  oligonucleotide probe

SEQ ID NO: 38023 - DNA, 32 bp, Artificial; identical to SEQ ID NO: 5229
  oligonucleotide probe

SEQ ID NO: 38024 - DNA, 32 bp, Artificial; identical to SEQ ID NO: 5223
  oligonucleotide probe

SEQ ID NO: 38025 - DNA, 32 bp, Artificial; identical to SEQ ID NO: 5223
  oligonucleotide probe

SEQ ID NO: 38026 - DNA, 32 bp, Artificial; identical to SEQ ID NO: 5410
  oligonucleotide probe

SEQ ID NO: 38027 - DNA, 32 bp, Artificial; identical to SEQ ID NO: 5410
  oligonucleotide probe

SEQ ID NO: 38028 - DNA, 32 bp, Artificial; identical to SEQ ID NO: 5140
  oligonucleotide probe

SEQ ID NO: 38029 - DNA, 32 bp, Artificial; identical to SEQ ID NO: 5140
  oligonucleotide probe

SEQ ID NO: 38030 - DNA, 32 bp, Artificial; identical to SEQ ID NO: 5220
  oligonucleotide probe

SEQ ID NO: 38031 - DNA, 32 bp, Artificial; identical to SEQ ID NO: 5220
  oligonucleotide probe

SEQ ID NO: 38032 - DNA, 32 bp, Artificial; identical to SEQ ID NO: 5219
  oligonucleotide probe

SEQ ID NO: 38033 - DNA, 32 bp, Artificial; identical to SEQ ID NO: 5219
  oligonucleotide probe

SEQ ID NO: 38034 - DNA, 32 bp, Artificial; identical to SEQ ID NO: 5253
  oligonucleotide probe

SEQ ID NO: 38035 - DNA, 32 bp, Artificial; identical to SEQ ID NO: 5253
  oligonucleotide probe

SEQ ID NO: 38036 - DNA, 32 bp, Artificial; identical to SEQ ID NO: 5399
  oligonucleotide probe

SEQ ID NO: 38037 - DNA, 32 bp, Artificial; identical to SEQ ID NO: 5399
  oligonucleotide probe

SEQ ID NO: 38038 - DNA, 32 bp, Artificial; identical to SEQ ID NO: 5219
  oligonucleotide probe

SEQ ID NO: 38039 - DNA, 32 bp, Artificial; identical to SEQ ID NO: 5219
  oligonucleotide probe

SEQ ID NO: 38040 - DNA, 32 bp, Artificial; identical to SEQ ID NO: 5220
  oligonucleotide probe

SEQ ID NO: 38041 - DNA, 32 bp, Artificial; identical to SEQ ID NO: 5220
  oligonucleotide probe

SEQ ID NO: 38042 - DNA, 32 bp, Artificial; identical to SEQ ID NO: 5411
  oligonucleotide probe

SEQ ID NO: 38043 - DNA, 32 bp, Artificial; identical to SEQ ID NO: 5411
  oligonucleotide probe

SEQ ID NO: 38044 - DNA, 32 bp, Artificial; identical to SEQ ID NO: 5223
  oligonucleotide probe

SEQ ID NO: 38045 - DNA, 32 bp, Artificial; identical to SEQ ID NO: 5223
  oligonucleotide probe

SEQ ID NO: 38046 - DNA, 32 bp, Artificial; identical to SEQ ID NO: 5218
  oligonucleotide probe

SEQ ID NO: 38047 - DNA, 32 bp, Artificial; identical to SEQ ID NO: 5240
  oligonucleotide probe

SEQ ID NO: 38048 - DNA, 32 bp, Artificial; identical to SEQ ID NO: 5221
  oligonucleotide probe

SEQ ID NO: 38049 - DNA, 32 bp, Artificial; identical to SEQ ID NO: 5241
  oligonucleotide probe

SEQ ID NO: 38050 - DNA, 32 bp, Artificial; identical to SEQ ID NO: 5222
  oligonucleotide probe

SEQ ID NO: 38051 - DNA, 32 bp, Artificial; identical to SEQ ID NO: 5223
  oligonucleotide probe

SEQ ID NO: 38052 - DNA, 32 bp, Artificial; identical to SEQ ID NO: 5224
  oligonucleotide probe

SEQ ID NO: 38053 - DNA, 32 bp, Artificial; identical to SEQ ID NO: 5231
  oligonucleotide probe

SEQ ID NO: 38054 - DNA, 32 bp, Artificial; identical to SEQ ID NO: 5220
  oligonucleotide probe

SEQ ID NO: 38055 - DNA, 32 bp, Artificial; identical to SEQ ID NO: 5219
  oligonucleotide probe

SEQ ID NO: 38056 - DNA, 32 bp, Artificial; identical to SEQ ID NO: 5221
  oligonucleotide probe

SEQ ID NO: 38057 - DNA, 32 bp, Artificial; identical to SEQ ID NO: 5221
  oligonucleotide probe

SEQ ID NO: 38058 - DNA, 32 bp, Artificial; identical to SEQ ID NO: 5218
  oligonucleotide probe

SEQ ID NO: 38059 - DNA, 32 bp, Artificial; identical to SEQ ID NO: 5218
  oligonucleotide probe

SEQ ID NO: 38060 - DNA, 32 bp, Artificial; identical to SEQ ID NO: 5253
  oligonucleotide probe

SEQ ID NO: 38061 - DNA, 32 bp, Artificial; identical to SEQ ID NO: 5253
  oligonucleotide probe

SEQ ID NO: 38062 - DNA, 32 bp, Artificial; identical to SEQ ID NO: 5140
  oligonucleotide probe

SEQ ID NO: 38063 - DNA, 32 bp, Artificial; identical to SEQ ID NO: 5140
  oligonucleotide probe

SEQ ID NO: 38064 - DNA, 32 bp, Artificial; identical to SEQ ID NO: 5177
  oligonucleotide probe

SEQ ID NO: 38065 - DNA, 32 bp, Artificial; identical to SEQ ID NO: 5177
  oligonucleotide probe

SEQ ID NO: 38066 - DNA, 32 bp, Artificial; identical to SEQ ID NO: 5399
  oligonucleotide probe

SEQ ID NO: 38067 - DNA, 32 bp, Artificial; identical to SEQ ID NO: 5399
  oligonucleotide probe

SEQ ID NO: 38068 - DNA, 32 bp, Artificial; identical to SEQ ID NO: 5229
  oligonucleotide probe

SEQ ID NO: 38069 - DNA, 32 bp, Artificial; identical to SEQ ID NO: 5229
  oligonucleotide probe

SEQ ID NO: 38070 - DNA, 32 bp, Artificial; identical to SEQ ID NO: 5133
  oligonucleotide probe

SEQ ID NO: 38071 - DNA, 32 bp, Artificial; identical to SEQ ID NO: 5133
  oligonucleotide probe

SEQ ID NO: 38072 - DNA, 32 bp, Artificial; identical to SEQ ID NO: 5222
  oligonucleotide probe

SEQ ID NO: 38073 - DNA, 32 bp, Artificial; identical to SEQ ID NO: 5222
  oligonucleotide probe

SEQ ID NO: 38074 - DNA, 32 bp, Artificial; identical to SEQ ID NO: 5195
  oligonucleotide probe

SEQ ID NO: 38075 - DNA, 32 bp, Artificial; identical to SEQ ID NO: 5195
  oligonucleotide probe

SEQ ID NO: 38076 - DNA, 32 bp, Artificial; identical to SEQ ID NO: 5399
  oligonucleotide probe

SEQ ID NO: 38077 - DNA, 32 bp, Artificial; identical to SEQ ID NO: 5399
  oligonucleotide probe

SEQ ID NO: 38078 - DNA, 32 bp, Artificial; identical to SEQ ID NO: 5137
  oligonucleotide probe

SEQ ID NO: 38079 - DNA, 32 bp, Artificial; identical to SEQ ID NO: 5137
  oligonucleotide probe

SEQ ID NO: 38080 - DNA, 32 bp, Artificial; identical to SEQ ID NO: 5141
  oligonucleotide probe

SEQ ID NO: 38081 - DNA, 32 bp, Artificial; identical to SEQ ID NO: 5141
  oligonucleotide probe

SEQ ID NO: 38082 - DNA, 32 bp, Artificial; identical to SEQ ID NO: 5135
  oligonucleotide probe

SEQ ID NO: 38083 - DNA, 32 bp, Artificial; identical to SEQ ID NO: 5135
  oligonucleotide probe

SEQ ID NO: 38084 - DNA, 32 bp, Artificial; identical to SEQ ID NO: 5133
  oligonucleotide probe

SEQ ID NO: 38085 - DNA, 32 bp, Artificial; identical to SEQ ID NO: 5133
  oligonucleotide probe

SEQ ID NO: 38086 - DNA, 32 bp, Artificial; identical to SEQ ID NO: 5231
  oligonucleotide probe

SEQ ID NO: 38087 - DNA, 32 bp, Artificial; identical to SEQ ID NO: 5231
  oligonucleotide probe

SEQ ID NO: 38088 - DNA, 32 bp, Artificial; identical to SEQ ID NO: 5242
  oligonucleotide probe

SEQ ID NO: 38089 - DNA, 32 bp, Artificial; identical to SEQ ID NO: 5242
  oligonucleotide probe

SEQ ID NO: 38090 - DNA, 32 bp, Artificial; identical to SEQ ID NO: 5410
  oligonucleotide probe

SEQ ID NO: 38091 - DNA, 32 bp, Artificial; identical to SEQ ID NO: 5410
  oligonucleotide probe

SEQ ID NO: 38092 - DNA, 32 bp, Artificial; identical to SEQ ID NO: 5239
  oligonucleotide probe

SEQ ID NO: 38093 - DNA, 32 bp, Artificial; identical to SEQ ID NO: 5239
  oligonucleotide probe

SEQ ID NO: 38094 - DNA, 32 bp, Artificial; identical to SEQ ID NO: 5416
  oligonucleotide probe

SEQ ID NO: 38095 - DNA, 32 bp, Artificial; identical to SEQ ID NO: 5416
  oligonucleotide probe

SEQ ID NO: 38096 - DNA, 32 bp, Artificial; identical to SEQ ID NO: 5138
  oligonucleotide probe

SEQ ID NO: 38097 - DNA, 32 bp, Artificial; identical to SEQ ID NO: 5138
  oligonucleotide probe

SEQ ID NO: 38098 - DNA, 32 bp, Artificial; identical to SEQ ID NO: 5133
  oligonucleotide probe

SEQ ID NO: 38099 - DNA, 32 bp, Artificial; identical to SEQ ID NO: 5133
  oligonucleotide probe

SEQ ID NO: 38100 - DNA, 32 bp, Artificial; identical to SEQ ID NO: 5161
  oligonucleotide probe

SEQ ID NO: 38101 - DNA, 32 bp, Artificial; identical to SEQ ID NO: 5161
  oligonucleotide probe

SEQ ID NO: 38102 - DNA, 32 bp, Artificial; identical to SEQ ID NO: 5134
  oligonucleotide probe

SEQ ID NO: 38103 - DNA, 32 bp, Artificial; identical to SEQ ID NO: 5134
  oligonucleotide probe

SEQ ID NO: 38104 - DNA, 32 bp, Artificial; identical to SEQ ID NO: 5240
  oligonucleotide probe

SEQ ID NO: 38105 - DNA, 32 bp, Artificial; identical to SEQ ID NO: 5240
  oligonucleotide probe

SEQ ID NO: 38106 - DNA, 32 bp, Artificial; identical to SEQ ID NO: 5241
  oligonucleotide probe

SEQ ID NO: 38107 - DNA, 32 bp, Artificial; identical to SEQ ID NO: 5241
  oligonucleotide probe

SEQ ID NO: 38108 - DNA, 32 bp, Artificial; identical to SEQ ID NO: 5217
  oligonucleotide probe

SEQ ID NO: 38109 - DNA, 32 bp, Artificial; identical to SEQ ID NO: 5217
  oligonucleotide probe

SEQ ID NO: 38110 - DNA, 32 bp, Artificial; identical to SEQ ID NO: 5584
  oligonucleotide probe

SEQ ID NO: 38111 - DNA, 32 bp, Artificial; identical to SEQ ID NO: 5584
  oligonucleotide probe

SEQ ID NO: 38112 - DNA, 32 bp, Artificial; identical to SEQ ID NO: 5135
  oligonucleotide probe

SEQ ID NO: 38113 - DNA, 32 bp, Artificial; identical to SEQ ID NO: 5135
  oligonucleotide probe

SEQ ID NO: 38114 - DNA, 32 bp, Artificial; identical to SEQ ID NO: 5399
  oligonucleotide probe

SEQ ID NO: 38115 - DNA, 32 bp, Artificial; identical to SEQ ID NO: 5399
  oligonucleotide probe

SEQ ID NO: 38116 - DNA, 32 bp, Artificial; identical to SEQ ID NO: 5141
  oligonucleotide probe

SEQ ID NO: 38117 - DNA, 32 bp, Artificial; identical to SEQ ID NO: 5141
  oligonucleotide probe

SEQ ID NO: 38118 - DNA, 32 bp, Artificial; identical to SEQ ID NO: 5163
  oligonucleotide probe

SEQ ID NO: 38119 - DNA, 32 bp, Artificial; identical to SEQ ID NO: 5163
  oligonucleotide probe

SEQ ID NO: 38120 - DNA, 32 bp, Artificial; identical to SEQ ID NO: 5171
  oligonucleotide probe

SEQ ID NO: 38121 - DNA, 32 bp, Artificial; identical to SEQ ID NO: 5171
  oligonucleotide probe

SEQ ID NO: 38122 - DNA, 32 bp, Artificial; identical to SEQ ID NO: 5136
  oligonucleotide probe

SEQ ID NO: 38123 - DNA, 32 bp, Artificial; identical to SEQ ID NO: 5136
  oligonucleotide probe

SEQ ID NO: 38124 - DNA, 32 bp, Artificial; identical to SEQ ID NO: 5137
  oligonucleotide probe

SEQ ID NO: 38125 - DNA, 32 bp, Artificial; identical to SEQ ID NO: 5137
  oligonucleotide probe

SEQ ID NO: 38126 - DNA, 32 bp, Artificial; identical to SEQ ID NO: 5241
  oligonucleotide probe

SEQ ID NO: 38127 - DNA, 32 bp, Artificial; identical to SEQ ID NO: 5241
  oligonucleotide probe

SEQ ID NO: 38128 - DNA, 32 bp, Artificial; identical to SEQ ID NO: 5242
  oligonucleotide probe

SEQ ID NO: 38129 - DNA, 32 bp, Artificial; identical to SEQ ID NO: 5242
  oligonucleotide probe

SEQ ID NO: 38130 - DNA, 32 bp, Artificial; identical to SEQ ID NO: 5399
  oligonucleotide probe

SEQ ID NO: 38131 - DNA, 32 bp, Artificial; identical to SEQ ID NO: 5399
  oligonucleotide probe

SEQ ID NO: 38132 - DNA, 32 bp, Artificial; identical to SEQ ID NO: 5416
  oligonucleotide probe

SEQ ID NO: 38133 - DNA, 32 bp, Artificial; identical to SEQ ID NO: 5416
  oligonucleotide probe

SEQ ID NO: 38134 - DNA, 32 bp, Artificial; identical to SEQ ID NO: 5177
  oligonucleotide probe

SEQ ID NO: 38135 - DNA, 32 bp, Artificial; identical to SEQ ID NO: 5177
  oligonucleotide probe

SEQ ID NO: 38136 - DNA, 32 bp, Artificial; identical to SEQ ID NO: 5239
  oligonucleotide probe

SEQ ID NO: 38137 - DNA, 32 bp, Artificial; identical to SEQ ID NO: 5239
  oligonucleotide probe

SEQ ID NO: 38138 - DNA, 32 bp, Artificial; identical to SEQ ID NO: 6131
  oligonucleotide probe

SEQ ID NO: 38139 - DNA, 32 bp, Artificial; identical to SEQ ID NO: 6131
  oligonucleotide probe

SEQ ID NO: 38140 - DNA, 32 bp, Artificial; identical to SEQ ID NO: 5239
  oligonucleotide probe

SEQ ID NO: 38141 - DNA, 32 bp, Artificial; identical to SEQ ID NO: 5239
  oligonucleotide probe

SEQ ID NO: 38142 - DNA, 32 bp, Artificial; identical to SEQ ID NO: 5133
  oligonucleotide probe

SEQ ID NO: 38143 - DNA, 32 bp, Artificial; identical to SEQ ID NO: 5133
  oligonucleotide probe

SEQ ID NO: 38144 - DNA, 32 bp, Artificial; identical to SEQ ID NO: 5163
  oligonucleotide probe

SEQ ID NO: 38145 - DNA, 32 bp, Artificial; identical to SEQ ID NO: 5163
  oligonucleotide probe

SEQ ID NO: 38146 - DNA, 32 bp, Artificial; identical to SEQ ID NO: 5171
  oligonucleotide probe

SEQ ID NO: 38147 - DNA, 32 bp, Artificial; identical to SEQ ID NO: 5171
  oligonucleotide probe

SEQ ID NO: 38148 - DNA, 32 bp, Artificial; identical to SEQ ID NO: 5138
  oligonucleotide probe

SEQ ID NO: 38149 - DNA, 32 bp, Artificial; identical to SEQ ID NO: 5138
  oligonucleotide probe

SEQ ID NO: 38150 - DNA, 32 bp, Artificial; identical to SEQ ID NO: 5133
  oligonucleotide probe

SEQ ID NO: 38151 - DNA, 32 bp, Artificial; identical to SEQ ID NO: 5133
  oligonucleotide probe

SEQ ID NO: 38152 - DNA, 32 bp, Artificial; identical to SEQ ID NO: 5195
  oligonucleotide probe

SEQ ID NO: 38153 - DNA, 32 bp, Artificial; identical to SEQ ID NO: 5195
  oligonucleotide probe

SEQ ID NO: 38154 - DNA, 32 bp, Artificial; identical to SEQ ID NO: 5159
  oligonucleotide probe

SEQ ID NO: 38155 - DNA, 32 bp, Artificial; identical to SEQ ID NO: 5159
  oligonucleotide probe

SEQ ID NO: 38156 - DNA, 32 bp, Artificial; identical to SEQ ID NO: 5160
  oligonucleotide probe

SEQ ID NO: 38157 - DNA, 32 bp, Artificial; identical to SEQ ID NO: 5160
  oligonucleotide probe

SEQ ID NO: 38158 - DNA, 32 bp, Artificial; identical to SEQ ID NO: 5253
  oligonucleotide probe

SEQ ID NO: 38159 - DNA, 32 bp, Artificial; identical to SEQ ID NO: 5253
  oligonucleotide probe

SEQ ID NO: 38160 - DNA, 32 bp, Artificial; identical to SEQ ID NO: 5195
  oligonucleotide probe

SEQ ID NO: 38161 - DNA, 32 bp, Artificial; identical to SEQ ID NO: 5195
  oligonucleotide probe

SEQ ID NO: 38162 - DNA, 32 bp, Artificial; identical to SEQ ID NO: 5540
  oligonucleotide probe

SEQ ID NO: 38163 - DNA, 32 bp, Artificial; identical to SEQ ID NO: 5540
  oligonucleotide probe

SEQ ID NO: 38164 - DNA, 32 bp, Artificial; identical to SEQ ID NO: 5411
  oligonucleotide probe

SEQ ID NO: 38165 - DNA, 32 bp, Artificial; identical to SEQ ID NO: 5411
  oligonucleotide probe

SEQ ID NO: 38166 - DNA, 32 bp, Artificial; identical to SEQ ID NO: 5159
  oligonucleotide probe

SEQ ID NO: 38167 - DNA, 32 bp, Artificial; identical to SEQ ID NO: 5159
  oligonucleotide probe

SEQ ID NO: 38168 - DNA, 32 bp, Artificial; identical to SEQ ID NO: 5239
  oligonucleotide probe

SEQ ID NO: 38169 - DNA, 32 bp, Artificial; identical to SEQ ID NO: 5239
  oligonucleotide probe

SEQ ID NO: 38170 - DNA, 32 bp, Artificial; identical to SEQ ID NO: 5410
  oligonucleotide probe

SEQ ID NO: 38171 - DNA, 32 bp, Artificial; identical to SEQ ID NO: 5410
  oligonucleotide probe

SEQ ID NO: 38172 - DNA, 32 bp, Artificial; identical to SEQ ID NO: 5136
  oligonucleotide probe

SEQ ID NO: 38173 - DNA, 32 bp, Artificial; identical to SEQ ID NO: 5136
  oligonucleotide probe

SEQ ID NO: 38174 - DNA, 32 bp, Artificial; identical to SEQ ID NO: 5218
  oligonucleotide probe

SEQ ID NO: 38175 - DNA, 32 bp, Artificial; identical to SEQ ID NO: 5218
  oligonucleotide probe

SEQ ID NO: 38176 - DNA, 32 bp, Artificial; identical to SEQ ID NO: 5220
  oligonucleotide probe

SEQ ID NO: 38177 - DNA, 32 bp, Artificial; identical to SEQ ID NO: 5220
  oligonucleotide probe

SEQ ID NO: 38178 - DNA, 32 bp, Artificial; identical to SEQ ID NO: 5195
  oligonucleotide probe

SEQ ID NO: 38179 - DNA, 32 bp, Artificial; identical to SEQ ID NO: 5195
  oligonucleotide probe

SEQ ID NO: 38180 - DNA, 32 bp, Artificial; identical to SEQ ID NO: 5140
  oligonucleotide probe

SEQ ID NO: 38181 - DNA, 32 bp, Artificial; identical to SEQ ID NO: 5140
  oligonucleotide probe

SEQ ID NO: 38182 - DNA, 32 bp, Artificial; identical to SEQ ID NO: 5171
  oligonucleotide probe

SEQ ID NO: 38183 - DNA, 32 bp, Artificial; identical to SEQ ID NO: 5171
  oligonucleotide probe

SEQ ID NO: 38184 - DNA, 32 bp, Artificial; identical to SEQ ID NO: 5135
  oligonucleotide probe

SEQ ID NO: 38185 - DNA, 32 bp, Artificial; identical to SEQ ID NO: 5135
  oligonucleotide probe

SEQ ID NO: 38186 - DNA, 32 bp, Artificial; identical to SEQ ID NO: 5242
  oligonucleotide probe

SEQ ID NO: 38187 - DNA, 32 bp, Artificial; identical to SEQ ID NO: 5242
  oligonucleotide probe

SEQ ID NO: 38188 - DNA, 32 bp, Artificial; identical to SEQ ID NO: 5220
  oligonucleotide probe

SEQ ID NO: 38189 - DNA, 32 bp, Artificial; identical to SEQ ID NO: 5220
  oligonucleotide probe

SEQ ID NO: 38190 - DNA, 32 bp, Artificial; identical to SEQ ID NO: 5610
  oligonucleotide probe

SEQ ID NO: 38191 - DNA, 32 bp, Artificial; identical to SEQ ID NO: 5610
  oligonucleotide probe

SEQ ID NO: 38192 - DNA, 32 bp, Artificial; identical to SEQ ID NO: 5242
  oligonucleotide probe

SEQ ID NO: 38193 - DNA, 32 bp, Artificial; identical to SEQ ID NO: 5242
  oligonucleotide probe

SEQ ID NO: 38194 - DNA, 32 bp, Artificial; identical to SEQ ID NO: 5223
  oligonucleotide probe

SEQ ID NO: 38195 - DNA, 32 bp, Artificial; identical to SEQ ID NO: 5223
  oligonucleotide probe

SEQ ID NO: 38196 - DNA, 32 bp, Artificial; identical to SEQ ID NO: 5185
  oligonucleotide probe

SEQ ID NO: 38197 - DNA, 32 bp, Artificial; identical to SEQ ID NO: 5185
  oligonucleotide probe

SEQ ID NO: 38198 - DNA, 32 bp, Artificial; identical to SEQ ID NO: 5550
  oligonucleotide probe

SEQ ID NO: 38199 - DNA, 32 bp, Artificial; identical to SEQ ID NO: 5550
  oligonucleotide probe

SEQ ID NO: 38200 - DNA, 32 bp, Artificial; identical to SEQ ID NO: 5141
  oligonucleotide probe

SEQ ID NO: 38201 - DNA, 32 bp, Artificial; identical to SEQ ID NO: 5141
  oligonucleotide probe

SEQ ID NO: 38202 - DNA, 32 bp, Artificial; identical to SEQ ID NO: 5416
  oligonucleotide probe

SEQ ID NO: 38203 - DNA, 32 bp, Artificial; identical to SEQ ID NO: 5416
  oligonucleotide probe

SEQ ID NO: 38204 - DNA, 32 bp, Artificial; identical to SEQ ID NO: 5159
  oligonucleotide probe

SEQ ID NO: 38205 - DNA, 32 bp, Artificial; identical to SEQ ID NO: 5159
  oligonucleotide probe

SEQ ID NO: 38206 - DNA, 32 bp, Artificial; identical to SEQ ID NO: 5161
  oligonucleotide probe

SEQ ID NO: 38207 - DNA, 32 bp, Artificial; identical to SEQ ID NO: 5161
  oligonucleotide probe

SEQ ID NO: 38208 - DNA, 32 bp, Artificial; identical to SEQ ID NO: 5410
  oligonucleotide probe

SEQ ID NO: 38209 - DNA, 32 bp, Artificial; identical to SEQ ID NO: 5410
  oligonucleotide probe

SEQ ID NO: 38210 - DNA, 32 bp, Artificial; identical to SEQ ID NO: 5241
  oligonucleotide probe

SEQ ID NO: 38211 - DNA, 32 bp, Artificial; identical to SEQ ID NO: 5241
  oligonucleotide probe

SEQ ID NO: 38212 - DNA, 32 bp, Artificial; identical to SEQ ID NO: 5240
  oligonucleotide probe

SEQ ID NO: 38213 - DNA, 32 bp, Artificial; identical to SEQ ID NO: 5240
  oligonucleotide probe

SEQ ID NO: 38214 - DNA, 32 bp, Artificial; identical to SEQ ID NO: 5253
  oligonucleotide probe

SEQ ID NO: 38215 - DNA, 32 bp, Artificial; identical to SEQ ID NO: 5253
  oligonucleotide probe

SEQ ID NO: 38216 - DNA, 32 bp, Artificial; identical to SEQ ID NO: 5231
  oligonucleotide probe

SEQ ID NO: 38217 - DNA, 32 bp, Artificial; identical to SEQ ID NO: 5231
  oligonucleotide probe

SEQ ID NO: 38218 - DNA, 32 bp, Artificial; identical to SEQ ID NO: 5232
  oligonucleotide probe

SEQ ID NO: 38219 - DNA, 32 bp, Artificial; identical to SEQ ID NO: 5232
  oligonucleotide probe

SEQ ID NO: 38220 - DNA, 32 bp, Artificial; identical to SEQ ID NO: 5137
  oligonucleotide probe

SEQ ID NO: 38221 - DNA, 32 bp, Artificial; identical to SEQ ID NO: 5137
  oligonucleotide probe

SEQ ID NO: 38222 - DNA, 32 bp, Artificial; identical to SEQ ID NO: 5232
  oligonucleotide probe

SEQ ID NO: 38223 - DNA, 32 bp, Artificial; identical to SEQ ID NO: 5232
  oligonucleotide probe

SEQ ID NO: 38224 - DNA, 32 bp, Artificial; identical to SEQ ID NO: 5138
  oligonucleotide probe

SEQ ID NO: 38225 - DNA, 32 bp, Artificial; identical to SEQ ID NO: 5138
  oligonucleotide probe

SEQ ID NO: 38226 - DNA, 32 bp, Artificial; identical to SEQ ID NO: 5185
  oligonucleotide probe

SEQ ID NO: 38227 - DNA, 32 bp, Artificial; identical to SEQ ID NO: 5185
  oligonucleotide probe

SEQ ID NO: 38228 - DNA, 32 bp, Artificial; identical to SEQ ID NO: 5171
  oligonucleotide probe

SEQ ID NO: 38229 - DNA, 32 bp, Artificial; identical to SEQ ID NO: 5171
  oligonucleotide probe

SEQ ID NO: 38230 - DNA, 32 bp, Artificial; identical to SEQ ID NO: 5136
  oligonucleotide probe

SEQ ID NO: 38231 - DNA, 32 bp, Artificial; identical to SEQ ID NO: 5136
  oligonucleotide probe

SEQ ID NO: 38232 - DNA, 32 bp, Artificial; identical to SEQ ID NO: 5160
  oligonucleotide probe

SEQ ID NO: 38233 - DNA, 32 bp, Artificial; identical to SEQ ID NO: 5160
  oligonucleotide probe

SEQ ID NO: 38234 - DNA, 32 bp, Artificial; identical to SEQ ID NO: 5195
  oligonucleotide probe

SEQ ID NO: 38235 - DNA, 32 bp, Artificial; identical to SEQ ID NO: 5195
  oligonucleotide probe

SEQ ID NO: 38236 - DNA, 32 bp, Artificial; identical to SEQ ID NO: 5140
  oligonucleotide probe

SEQ ID NO: 38237 - DNA, 32 bp, Artificial; identical to SEQ ID NO: 5140
  oligonucleotide probe

SEQ ID NO: 38238 - DNA, 32 bp, Artificial; identical to SEQ ID NO: 5171
  oligonucleotide probe

SEQ ID NO: 38239 - DNA, 32 bp, Artificial; identical to SEQ ID NO: 5171
  oligonucleotide probe

SEQ ID NO: 38240 - DNA, 32 bp, Artificial; identical to SEQ ID NO: 5171
  oligonucleotide probe

SEQ ID NO: 38241 - DNA, 32 bp, Artificial; identical to SEQ ID NO: 5171
  oligonucleotide probe

SEQ ID NO: 38242 - DNA, 32 bp, Artificial; identical to SEQ ID NO: 5399
  oligonucleotide probe

SEQ ID NO: 38243 - DNA, 32 bp, Artificial; identical to SEQ ID NO: 5399
  oligonucleotide probe

SEQ ID NO: 38244 - DNA, 32 bp, Artificial; identical to SEQ ID NO: 5253
  oligonucleotide probe

SEQ ID NO: 38245 - DNA, 32 bp, Artificial; identical to SEQ ID NO: 5253
  oligonucleotide probe

SEQ ID NO: 38246 - DNA, 32 bp, Artificial; identical to SEQ ID NO: 5229
  oligonucleotide probe

SEQ ID NO: 38247 - DNA, 32 bp, Artificial; identical to SEQ ID NO: 5229
  oligonucleotide probe

SEQ ID NO: 38248 - DNA, 32 bp, Artificial; identical to SEQ ID NO: 5218
  oligonucleotide probe

SEQ ID NO: 38249 - DNA, 32 bp, Artificial; identical to SEQ ID NO: 5218
  oligonucleotide probe

SEQ ID NO: 38250 - DNA, 32 bp, Artificial; identical to SEQ ID NO: 5219
  oligonucleotide probe

SEQ ID NO: 38251 - DNA, 32 bp, Artificial; identical to SEQ ID NO: 5219
  oligonucleotide probe

SEQ ID NO: 38252 - DNA, 32 bp, Artificial; identical to SEQ ID NO: 5140
  oligonucleotide probe

SEQ ID NO: 38253 - DNA, 32 bp, Artificial; identical to SEQ ID NO: 5140
  oligonucleotide probe

SEQ ID NO: 38254 - DNA, 32 bp, Artificial; identical to SEQ ID NO: 5544
  oligonucleotide probe

SEQ ID NO: 38255 - DNA, 32 bp, Artificial; identical to SEQ ID NO: 5544
  oligonucleotide probe

SEQ ID NO: 38256 - DNA, 32 bp, Artificial; identical to SEQ ID NO: 5185
  oligonucleotide probe

SEQ ID NO: 38257 - DNA, 32 bp, Artificial; identical to SEQ ID NO: 5185
  oligonucleotide probe

SEQ ID NO: 38258 - DNA, 32 bp, Artificial; identical to SEQ ID NO: 5224
  oligonucleotide probe

SEQ ID NO: 38259 - DNA, 32 bp, Artificial; identical to SEQ ID NO: 5224
  oligonucleotide probe

SEQ ID NO: 38260 - DNA, 32 bp, Artificial; identical to SEQ ID NO: 5159
  oligonucleotide probe

SEQ ID NO: 38261 - DNA, 32 bp, Artificial; identical to SEQ ID NO: 5159
  oligonucleotide probe

SEQ ID NO: 38262 - DNA, 32 bp, Artificial; identical to SEQ ID NO: 5410
  oligonucleotide probe

SEQ ID NO: 38263 - DNA, 32 bp, Artificial; identical to SEQ ID NO: 5410
  oligonucleotide probe

SEQ ID NO: 38264 - DNA, 32 bp, Artificial; identical to SEQ ID NO: 5160
  oligonucleotide probe

SEQ ID NO: 38265 - DNA, 32 bp, Artificial; identical to SEQ ID NO: 5160
  oligonucleotide probe

SEQ ID NO: 38266 - DNA, 32 bp, Artificial; identical to SEQ ID NO: 5195
  oligonucleotide probe

SEQ ID NO: 38267 - DNA, 32 bp, Artificial; identical to SEQ ID NO: 5195
  oligonucleotide probe

SEQ ID NO: 38268 - DNA, 32 bp, Artificial; identical to SEQ ID NO: 5229
  oligonucleotide probe

SEQ ID NO: 38269 - DNA, 32 bp, Artificial; identical to SEQ ID NO: 5229
  oligonucleotide probe

SEQ ID NO: 38270 - DNA, 32 bp, Artificial; identical to SEQ ID NO: 5134
  oligonucleotide probe

SEQ ID NO: 38271 - DNA, 32 bp, Artificial; identical to SEQ ID NO: 5134
  oligonucleotide probe

SEQ ID NO: 38272 - DNA, 32 bp, Artificial; identical to SEQ ID NO: 5177
  oligonucleotide probe

SEQ ID NO: 38273 - DNA, 32 bp, Artificial; identical to SEQ ID NO: 5177
  oligonucleotide probe

SEQ ID NO: 38274 - DNA, 32 bp, Artificial; identical to SEQ ID NO: 5163
  oligonucleotide probe

SEQ ID NO: 38275 - DNA, 32 bp, Artificial; identical to SEQ ID NO: 5163
  oligonucleotide probe

SEQ ID NO: 38276 - DNA, 32 bp, Artificial; identical to SEQ ID NO: 5177
  oligonucleotide probe

SEQ ID NO: 38277 - DNA, 32 bp, Artificial; identical to SEQ ID NO: 5177
  oligonucleotide probe

SEQ ID NO: 38278 - DNA, 32 bp, Artificial; identical to SEQ ID NO: 5141
  oligonucleotide probe

SEQ ID NO: 38279 - DNA, 32 bp, Artificial; identical to SEQ ID NO: 5141
  oligonucleotide probe

SEQ ID NO: 38280 - DNA, 32 bp, Artificial; identical to SEQ ID NO: 5185
  oligonucleotide probe

SEQ ID NO: 38281 - DNA, 32 bp, Artificial; identical to SEQ ID NO: 5185
  oligonucleotide probe

SEQ ID NO: 38282 - DNA, 32 bp, Artificial; identical to SEQ ID NO: 5240
  oligonucleotide probe

SEQ ID NO: 38283 - DNA, 32 bp, Artificial; identical to SEQ ID NO: 5240
  oligonucleotide probe

SEQ ID NO: 38284 - DNA, 32 bp, Artificial; identical to SEQ ID NO: 5137
  oligonucleotide probe

SEQ ID NO: 38285 - DNA, 32 bp, Artificial; identical to SEQ ID NO: 5137
  oligonucleotide probe

SEQ ID NO: 38286 - DNA, 32 bp, Artificial; identical to SEQ ID NO: 5222
  oligonucleotide probe

SEQ ID NO: 38287 - DNA, 32 bp, Artificial; identical to SEQ ID NO: 5222
  oligonucleotide probe

SEQ ID NO: 38288 - DNA, 32 bp, Artificial; identical to SEQ ID NO: 5229
  oligonucleotide probe

SEQ ID NO: 38289 - DNA, 32 bp, Artificial; identical to SEQ ID NO: 5229
  oligonucleotide probe

SEQ ID NO: 38290 - DNA, 32 bp, Artificial; identical to SEQ ID NO: 5240
  oligonucleotide probe

SEQ ID NO: 38291 - DNA, 32 bp, Artificial; identical to SEQ ID NO: 5240
  oligonucleotide probe

SEQ ID NO: 38292 - DNA, 32 bp, Artificial; identical to SEQ ID NO: 5177
  oligonucleotide probe

SEQ ID NO: 38293 - DNA, 32 bp, Artificial; identical to SEQ ID NO: 5177
  oligonucleotide probe

SEQ ID NO: 38294 - DNA, 32 bp, Artificial; identical to SEQ ID NO: 5240
  oligonucleotide probe

SEQ ID NO: 38295 - DNA, 32 bp, Artificial; identical to SEQ ID NO: 5240
  oligonucleotide probe

SEQ ID NO: 38296 - DNA, 32 bp, Artificial; identical to SEQ ID NO: 5138
  oligonucleotide probe

SEQ ID NO: 38297 - DNA, 32 bp, Artificial; identical to SEQ ID NO: 5138
  oligonucleotide probe

SEQ ID NO: 38298 - DNA, 32 bp, Artificial; identical to SEQ ID NO: 5240
  oligonucleotide probe

SEQ ID NO: 38299 - DNA, 32 bp, Artificial; identical to SEQ ID NO: 5240
  oligonucleotide probe

SEQ ID NO: 38300 - DNA, 32 bp, Artificial; identical to SEQ ID NO: 5138
  oligonucleotide probe

SEQ ID NO: 38301 - DNA, 32 bp, Artificial; identical to SEQ ID NO: 5138
  oligonucleotide probe

SEQ ID NO: 38302 - DNA, 32 bp, Artificial; identical to SEQ ID NO: 5221
  oligonucleotide probe

SEQ ID NO: 38303 - DNA, 32 bp, Artificial; identical to SEQ ID NO: 5221
  oligonucleotide probe

SEQ ID NO: 38304 - DNA, 32 bp, Artificial; identical to SEQ ID NO: 5135
  oligonucleotide probe

SEQ ID NO: 38305 - DNA, 32 bp, Artificial; identical to SEQ ID NO: 5135
  oligonucleotide probe

SEQ ID NO: 38306 - DNA, 32 bp, Artificial; identical to SEQ ID NO: 5241
  oligonucleotide probe

SEQ ID NO: 38307 - DNA, 32 bp, Artificial; identical to SEQ ID NO: 5241
  oligonucleotide probe

SEQ ID NO: 38308 - DNA, 32 bp, Artificial; identical to SEQ ID NO: 5411
  oligonucleotide probe

SEQ ID NO: 38309 - DNA, 32 bp, Artificial; identical to SEQ ID NO: 5411
  oligonucleotide probe

SEQ ID NO: 38310 - DNA, 32 bp, Artificial; identical to SEQ ID NO: 5163
  oligonucleotide probe

SEQ ID NO: 38311 - DNA, 32 bp, Artificial; identical to SEQ ID NO: 5163
  oligonucleotide probe

SEQ ID NO: 38312 - DNA, 32 bp, Artificial; identical to SEQ ID NO: 5231
  oligonucleotide probe

SEQ ID NO: 38313 - DNA, 32 bp, Artificial; identical to SEQ ID NO: 5231
  oligonucleotide probe

SEQ ID NO: 38314 - DNA, 32 bp, Artificial; identical to SEQ ID NO: 5177
  oligonucleotide probe

SEQ ID NO: 38315 - DNA, 32 bp, Artificial; identical to SEQ ID NO: 5177
  oligonucleotide probe

SEQ ID NO: 38316 - DNA, 32 bp, Artificial; identical to SEQ ID NO: 5159
  oligonucleotide probe

SEQ ID NO: 38317 - DNA, 32 bp, Artificial; identical to SEQ ID NO: 5159
  oligonucleotide probe

SEQ ID NO: 38318 - DNA, 32 bp, Artificial; identical to SEQ ID NO: 5163
  oligonucleotide probe

SEQ ID NO: 38319 - DNA, 32 bp, Artificial; identical to SEQ ID NO: 5163
  oligonucleotide probe

SEQ ID NO: 38320 - DNA, 32 bp, Artificial; identical to SEQ ID NO: 5161
  oligonucleotide probe

SEQ ID NO: 38321 - DNA, 32 bp, Artificial; identical to SEQ ID NO: 5161
  oligonucleotide probe

SEQ ID NO: 38322 - DNA, 32 bp, Artificial; identical to SEQ ID NO: 5221
  oligonucleotide probe

SEQ ID NO: 38323 - DNA, 32 bp, Artificial; identical to SEQ ID NO: 5221
  oligonucleotide probe

SEQ ID NO: 38324 - DNA, 32 bp, Artificial; identical to SEQ ID NO: 5232
  oligonucleotide probe

SEQ ID NO: 38325 - DNA, 32 bp, Artificial; identical to SEQ ID NO: 5232
  oligonucleotide probe

SEQ ID NO: 38326 - DNA, 32 bp, Artificial; identical to SEQ ID NO: 5133
  oligonucleotide probe

SEQ ID NO: 38327 - DNA, 32 bp, Artificial; identical to SEQ ID NO: 5133
  oligonucleotide probe

SEQ ID NO: 38328 - DNA, 32 bp, Artificial; identical to SEQ ID NO: 5538
  oligonucleotide probe

SEQ ID NO: 38329 - DNA, 32 bp, Artificial; identical to SEQ ID NO: 5538
  oligonucleotide probe

SEQ ID NO: 38330 - DNA, 32 bp, Artificial; identical to SEQ ID NO: 5229
  oligonucleotide probe

SEQ ID NO: 38331 - DNA, 32 bp, Artificial; identical to SEQ ID NO: 5229
  oligonucleotide probe

SEQ ID NO: 38332 - DNA, 32 bp, Artificial; identical to SEQ ID NO: 5161
  oligonucleotide probe

SEQ ID NO: 38333 - DNA, 32 bp, Artificial; identical to SEQ ID NO: 5161
  oligonucleotide probe

SEQ ID NO: 38334 - DNA, 32 bp, Artificial; identical to SEQ ID NO: 5221
  oligonucleotide probe

SEQ ID NO: 38335 - DNA, 32 bp, Artificial; identical to SEQ ID NO: 5221
  oligonucleotide probe

SEQ ID NO: 38336 - DNA, 32 bp, Artificial; identical to SEQ ID NO: 5222
  oligonucleotide probe

SEQ ID NO: 38337 - DNA, 32 bp, Artificial; identical to SEQ ID NO: 5222
  oligonucleotide probe

SEQ ID NO: 38338 - DNA, 32 bp, Artificial; identical to SEQ ID NO: 5177
  oligonucleotide probe

SEQ ID NO: 38339 - DNA, 32 bp, Artificial; identical to SEQ ID NO: 5177
  oligonucleotide probe

SEQ ID NO: 38340 - DNA, 32 bp, Artificial; identical to SEQ ID NO: 5242
  oligonucleotide probe

SEQ ID NO: 38341 - DNA, 32 bp, Artificial; identical to SEQ ID NO: 5242
  oligonucleotide probe

SEQ ID NO: 38342 - DNA, 32 bp, Artificial; identical to SEQ ID NO: 5241
  oligonucleotide probe

SEQ ID NO: 38343 - DNA, 32 bp, Artificial; identical to SEQ ID NO: 5241
  oligonucleotide probe

SEQ ID NO: 38344 - DNA, 32 bp, Artificial; identical to SEQ ID NO: 5217
  oligonucleotide probe

SEQ ID NO: 38345 - DNA, 32 bp, Artificial; identical to SEQ ID NO: 5217
  oligonucleotide probe

SEQ ID NO: 38346 - DNA, 32 bp, Artificial; identical to SEQ ID NO: 5411
  oligonucleotide probe

SEQ ID NO: 38347 - DNA, 32 bp, Artificial; identical to SEQ ID NO: 5411
  oligonucleotide probe

SEQ ID NO: 38348 - DNA, 32 bp, Artificial; identical to SEQ ID NO: 5195
  oligonucleotide probe

SEQ ID NO: 38349 - DNA, 32 bp, Artificial; identical to SEQ ID NO: 5195
  oligonucleotide probe

SEQ ID NO: 38350 - DNA, 32 bp, Artificial; identical to SEQ ID NO: 5218
  oligonucleotide probe

SEQ ID NO: 38351 - DNA, 32 bp, Artificial; identical to SEQ ID NO: 5218
  oligonucleotide probe

SEQ ID NO: 38352 - DNA, 32 bp, Artificial; identical to SEQ ID NO: 5231
  oligonucleotide probe

SEQ ID NO: 38353 - DNA, 32 bp, Artificial; identical to SEQ ID NO: 5231
  oligonucleotide probe

SEQ ID NO: 38354 - DNA, 32 bp, Artificial; identical to SEQ ID NO: 6145
  oligonucleotide probe

SEQ ID NO: 38355 - DNA, 32 bp, Artificial; identical to SEQ ID NO: 6145
  oligonucleotide probe

SEQ ID NO: 38356 - DNA, 32 bp, Artificial; identical to SEQ ID NO: 5171
  oligonucleotide probe

SEQ ID NO: 38357 - DNA, 32 bp, Artificial; identical to SEQ ID NO: 5171
  oligonucleotide probe

SEQ ID NO: 38358 - DNA, 32 bp, Artificial; identical to SEQ ID NO: 5163
  oligonucleotide probe

SEQ ID NO: 38359 - DNA, 32 bp, Artificial; identical to SEQ ID NO: 5163
  oligonucleotide probe

SEQ ID NO: 38360 - DNA, 32 bp, Artificial; identical to SEQ ID NO: 5163
  oligonucleotide probe

SEQ ID NO: 38361 - DNA, 32 bp, Artificial; identical to SEQ ID NO: 5163
  oligonucleotide probe

SEQ ID NO: 38362 - DNA, 32 bp, Artificial; identical to SEQ ID NO: 5229
  oligonucleotide probe

SEQ ID NO: 38363 - DNA, 32 bp, Artificial; identical to SEQ ID NO: 5229
  oligonucleotide probe

SEQ ID NO: 38364 - DNA, 32 bp, Artificial; identical to SEQ ID NO: 5223
  oligonucleotide probe

SEQ ID NO: 38365 - DNA, 32 bp, Artificial; identical to SEQ ID NO: 5223
  oligonucleotide probe

SEQ ID NO: 38366 - DNA, 32 bp, Artificial; identical to SEQ ID NO: 5141
  oligonucleotide probe

SEQ ID NO: 38367 - DNA, 32 bp, Artificial; identical to SEQ ID NO: 5141
  oligonucleotide probe

SEQ ID NO: 38368 - DNA, 32 bp, Artificial; identical to SEQ ID NO: 5231
  oligonucleotide probe

SEQ ID NO: 38369 - DNA, 32 bp, Artificial; identical to SEQ ID NO: 5231
  oligonucleotide probe

SEQ ID NO: 38370 - DNA, 32 bp, Artificial; identical to SEQ ID NO: 5195
  oligonucleotide probe

SEQ ID NO: 38371 - DNA, 32 bp, Artificial; identical to SEQ ID NO: 5195
  oligonucleotide probe

SEQ ID NO: 38372 - DNA, 32 bp, Artificial; identical to SEQ ID NO: 5241
  oligonucleotide probe

SEQ ID NO: 38373 - DNA, 32 bp, Artificial; identical to SEQ ID NO: 5241
  oligonucleotide probe

SEQ ID NO: 38374 - DNA, 32 bp, Artificial; identical to SEQ ID NO: 5159
  oligonucleotide probe

SEQ ID NO: 38375 - DNA, 32 bp, Artificial; identical to SEQ ID NO: 5159
  oligonucleotide probe

SEQ ID NO: 38376 - DNA, 32 bp, Artificial; identical to SEQ ID NO: 5134
  oligonucleotide probe

SEQ ID NO: 38377 - DNA, 32 bp, Artificial; identical to SEQ ID NO: 5134
  oligonucleotide probe

SEQ ID NO: 38378 - DNA, 32 bp, Artificial; identical to SEQ ID NO: 5550
  oligonucleotide probe

SEQ ID NO: 38379 - DNA, 32 bp, Artificial; identical to SEQ ID NO: 5550
  oligonucleotide probe

SEQ ID NO: 38380 - DNA, 32 bp, Artificial; identical to SEQ ID NO: 5141
  oligonucleotide probe

SEQ ID NO: 38381 - DNA, 32 bp, Artificial; identical to SEQ ID NO: 5141
  oligonucleotide probe

SEQ ID NO: 38382 - DNA, 32 bp, Artificial; identical to SEQ ID NO: 5708
  oligonucleotide probe

SEQ ID NO: 38383 - DNA, 32 bp, Artificial; identical to SEQ ID NO: 5708
  oligonucleotide probe

SEQ ID NO: 38384 - DNA, 32 bp, Artificial; identical to SEQ ID NO: 5219
  oligonucleotide probe

SEQ ID NO: 38385 - DNA, 32 bp, Artificial; identical to SEQ ID NO: 5219
  oligonucleotide probe

SEQ ID NO: 38386 - DNA, 32 bp, Artificial; identical to SEQ ID NO: 5217
  oligonucleotide probe

SEQ ID NO: 38387 - DNA, 32 bp, Artificial; identical to SEQ ID NO: 5217
  oligonucleotide probe

SEQ ID NO: 38388 - DNA, 32 bp, Artificial; identical to SEQ ID NO: 5136
  oligonucleotide probe

SEQ ID NO: 38389 - DNA, 32 bp, Artificial; identical to SEQ ID NO: 5136
  oligonucleotide probe

SEQ ID NO: 38390 - DNA, 32 bp, Artificial; identical to SEQ ID NO: 5140
  oligonucleotide probe

SEQ ID NO: 38391 - DNA, 32 bp, Artificial; identical to SEQ ID NO: 5140
  oligonucleotide probe

SEQ ID NO: 38392 - DNA, 32 bp, Artificial; identical to SEQ ID NO: 5135
  oligonucleotide probe

SEQ ID NO: 38393 - DNA, 32 bp, Artificial; identical to SEQ ID NO: 5135
  oligonucleotide probe

SEQ ID NO: 38394 - DNA, 32 bp, Artificial; identical to SEQ ID NO: 5160
  oligonucleotide probe

SEQ ID NO: 38395 - DNA, 32 bp, Artificial; identical to SEQ ID NO: 5160
  oligonucleotide probe

SEQ ID NO: 38396 - DNA, 32 bp, Artificial; identical to SEQ ID NO: 5241
  oligonucleotide probe

SEQ ID NO: 38397 - DNA, 32 bp, Artificial; identical to SEQ ID NO: 5241
  oligonucleotide probe

SEQ ID NO: 38398 - DNA, 32 bp, Artificial; identical to SEQ ID NO: 5161
  oligonucleotide probe

SEQ ID NO: 38399 - DNA, 32 bp, Artificial; identical to SEQ ID NO: 5161
  oligonucleotide probe

SEQ ID NO: 38400 - DNA, 32 bp, Artificial; identical to SEQ ID NO: 5136
  oligonucleotide probe

SEQ ID NO: 38401 - DNA, 32 bp, Artificial; identical to SEQ ID NO: 5136
  oligonucleotide probe

SEQ ID NO: 38402 - DNA, 32 bp, Artificial; identical to SEQ ID NO: 5160
  oligonucleotide probe

SEQ ID NO: 38403 - DNA, 32 bp, Artificial; identical to SEQ ID NO: 5160
  oligonucleotide probe

SEQ ID NO: 38404 - DNA, 32 bp, Artificial; identical to SEQ ID NO: 5138
  oligonucleotide probe

SEQ ID NO: 38405 - DNA, 32 bp, Artificial; identical to SEQ ID NO: 5138
  oligonucleotide probe

SEQ ID NO: 38406 - DNA, 32 bp, Artificial; identical to SEQ ID NO: 5416
  oligonucleotide probe

SEQ ID NO: 38407 - DNA, 32 bp, Artificial; identical to SEQ ID NO: 5416
  oligonucleotide probe

SEQ ID NO: 38408 - DNA, 32 bp, Artificial; identical to SEQ ID NO: 5217
  oligonucleotide probe

SEQ ID NO: 38409 - DNA, 32 bp, Artificial; identical to SEQ ID NO: 5217
  oligonucleotide probe

SEQ ID NO: 38410 - DNA, 32 bp, Artificial; identical to SEQ ID NO: 5171
  oligonucleotide probe

SEQ ID NO: 38411 - DNA, 32 bp, Artificial; identical to SEQ ID NO: 5171
  oligonucleotide probe

SEQ ID NO: 38412 - DNA, 32 bp, Artificial; identical to SEQ ID NO: 5399
  oligonucleotide probe

SEQ ID NO: 38413 - DNA, 32 bp, Artificial; identical to SEQ ID NO: 5399
  oligonucleotide probe

SEQ ID NO: 38414 - DNA, 32 bp, Artificial; identical to SEQ ID NO: 5410
  oligonucleotide probe

SEQ ID NO: 38415 - DNA, 32 bp, Artificial; identical to SEQ ID NO: 5410
  oligonucleotide probe

SEQ ID NO: 38416 - DNA, 32 bp, Artificial; identical to SEQ ID NO: 5594
  oligonucleotide probe

SEQ ID NO: 38417 - DNA, 32 bp, Artificial; identical to SEQ ID NO: 5594
  oligonucleotide probe

SEQ ID NO: 38418 - DNA, 32 bp, Artificial; identical to SEQ ID NO: 6131
  oligonucleotide probe

SEQ ID NO: 38419 - DNA, 32 bp, Artificial; identical to SEQ ID NO: 6131
  oligonucleotide probe

SEQ ID NO: 38420 - DNA, 32 bp, Artificial; identical to SEQ ID NO: 5133
  oligonucleotide probe

SEQ ID NO: 38421 - DNA, 32 bp, Artificial; identical to SEQ ID NO: 5133
  oligonucleotide probe

SEQ ID NO: 38422 - DNA, 32 bp, Artificial; identical to SEQ ID NO: 5232
  oligonucleotide probe

SEQ ID NO: 38423 - DNA, 32 bp, Artificial; identical to SEQ ID NO: 5232
  oligonucleotide probe

SEQ ID NO: 38424 - DNA, 32 bp, Artificial; identical to SEQ ID NO: 5185
  oligonucleotide probe

SEQ ID NO: 38425 - DNA, 32 bp, Artificial; identical to SEQ ID NO: 5185
  oligonucleotide probe

SEQ ID NO: 38426 - DNA, 32 bp, Artificial; identical to SEQ ID NO: 5160
  oligonucleotide probe

SEQ ID NO: 38427 - DNA, 32 bp, Artificial; identical to SEQ ID NO: 5160
  oligonucleotide probe

SEQ ID NO: 38428 - DNA, 32 bp, Artificial; identical to SEQ ID NO: 5161
  oligonucleotide probe

SEQ ID NO: 38429 - DNA, 32 bp, Artificial; identical to SEQ ID NO: 5161
  oligonucleotide probe

SEQ ID NO: 38430 - DNA, 32 bp, Artificial; identical to SEQ ID NO: 5411
  oligonucleotide probe

SEQ ID NO: 38431 - DNA, 32 bp, Artificial; identical to SEQ ID NO: 5411
  oligonucleotide probe

SEQ ID NO: 38432 - DNA, 32 bp, Artificial; identical to SEQ ID NO: 5554
  oligonucleotide probe

SEQ ID NO: 38433 - DNA, 32 bp, Artificial; identical to SEQ ID NO: 5554
  oligonucleotide probe

SEQ ID NO: 38434 - DNA, 32 bp, Artificial; identical to SEQ ID NO: 5411
  oligonucleotide probe

SEQ ID NO: 38435 - DNA, 32 bp, Artificial; identical to SEQ ID NO: 5411
  oligonucleotide probe

SEQ ID NO: 38436 - DNA, 32 bp, Artificial; identical to SEQ ID NO: 5253
  oligonucleotide probe

SEQ ID NO: 38437 - DNA, 32 bp, Artificial; identical to SEQ ID NO: 5253
  oligonucleotide probe

SEQ ID NO: 38438 - DNA, 32 bp, Artificial; identical to SEQ ID NO: 5411
  oligonucleotide probe

SEQ ID NO: 38439 - DNA, 32 bp, Artificial; identical to SEQ ID NO: 5411
  oligonucleotide probe

SEQ ID NO: 38440 - DNA, 32 bp, Artificial; identical to SEQ ID NO: 5141
  oligonucleotide probe

SEQ ID NO: 38441 - DNA, 32 bp, Artificial; identical to SEQ ID NO: 5141
  oligonucleotide probe

SEQ ID NO: 38442 - DNA, 32 bp, Artificial; identical to SEQ ID NO: 5161
  oligonucleotide probe

SEQ ID NO: 38443 - DNA, 32 bp, Artificial; identical to SEQ ID NO: 5161
  oligonucleotide probe

SEQ ID NO: 38444 - DNA, 32 bp, Artificial; identical to SEQ ID NO: 5222
  oligonucleotide probe

SEQ ID NO: 38445 - DNA, 32 bp, Artificial; identical to SEQ ID NO: 5222
  oligonucleotide probe

SEQ ID NO: 38446 - DNA, 32 bp, Artificial; identical to SEQ ID NO: 5224
  oligonucleotide probe

SEQ ID NO: 38447 - DNA, 32 bp, Artificial; identical to SEQ ID NO: 5224
  oligonucleotide probe

SEQ ID NO: 38448 - DNA, 32 bp, Artificial; identical to SEQ ID NO: 5195
  oligonucleotide probe

SEQ ID NO: 38449 - DNA, 32 bp, Artificial; identical to SEQ ID NO: 5195
  oligonucleotide probe

SEQ ID NO: 38450 - DNA, 32 bp, Artificial; identical to SEQ ID NO: 5217
  oligonucleotide probe

SEQ ID NO: 38451 - DNA, 32 bp, Artificial; identical to SEQ ID NO: 5217
  oligonucleotide probe

SEQ ID NO: 38452 - DNA, 32 bp, Artificial; identical to SEQ ID NO: 5185
  oligonucleotide probe

SEQ ID NO: 38453 - DNA, 32 bp, Artificial; identical to SEQ ID NO: 5185
  oligonucleotide probe

SEQ ID NO: 38454 - DNA, 32 bp, Artificial; identical to SEQ ID NO: 5137
  oligonucleotide probe

SEQ ID NO: 38455 - DNA, 32 bp, Artificial; identical to SEQ ID NO: 5137
  oligonucleotide probe

SEQ ID NO: 38456 - DNA, 32 bp, Artificial; identical to SEQ ID NO: 5239
  oligonucleotide probe

SEQ ID NO: 38457 - DNA, 32 bp, Artificial; identical to SEQ ID NO: 5239
  oligonucleotide probe

SEQ ID NO: 38458 - DNA, 32 bp, Artificial; identical to SEQ ID NO: 5177
  oligonucleotide probe

SEQ ID NO: 38459 - DNA, 32 bp, Artificial; identical to SEQ ID NO: 5177
  oligonucleotide probe

SEQ ID NO: 38460 - DNA, 32 bp, Artificial; identical to SEQ ID NO: 5135
  oligonucleotide probe

SEQ ID NO: 38461 - DNA, 32 bp, Artificial; identical to SEQ ID NO: 5135
  oligonucleotide probe

SEQ ID NO: 38462 - DNA, 32 bp, Artificial; identical to SEQ ID NO: 5223
  oligonucleotide probe

SEQ ID NO: 38463 - DNA, 32 bp, Artificial; identical to SEQ ID NO: 5223
  oligonucleotide probe

SEQ ID NO: 38464 - DNA, 32 bp, Artificial; identical to SEQ ID NO: 5135
  oligonucleotide probe

SEQ ID NO: 38465 - DNA, 32 bp, Artificial; identical to SEQ ID NO: 5135
  oligonucleotide probe

SEQ ID NO: 38466 - DNA, 32 bp, Artificial; identical to SEQ ID NO: 5219
  oligonucleotide probe

SEQ ID NO: 38467 - DNA, 32 bp, Artificial; identical to SEQ ID NO: 5219
  oligonucleotide probe

SEQ ID NO: 38468 - DNA, 32 bp, Artificial; identical to SEQ ID NO: 5410
  oligonucleotide probe

SEQ ID NO: 38469 - DNA, 32 bp, Artificial; identical to SEQ ID NO: 5410
  oligonucleotide probe

SEQ ID NO: 38470 - DNA, 32 bp, Artificial; identical to SEQ ID NO: 5141
  oligonucleotide probe

SEQ ID NO: 38471 - DNA, 32 bp, Artificial; identical to SEQ ID NO: 5141
  oligonucleotide probe

SEQ ID NO: 38472 - DNA, 32 bp, Artificial; identical to SEQ ID NO: 5159
  oligonucleotide probe

SEQ ID NO: 38473 - DNA, 32 bp, Artificial; identical to SEQ ID NO: 5159
  oligonucleotide probe

SEQ ID NO: 38474 - DNA, 32 bp, Artificial; identical to SEQ ID NO: 5134
  oligonucleotide probe

SEQ ID NO: 38475 - DNA, 32 bp, Artificial; identical to SEQ ID NO: 5134
  oligonucleotide probe

SEQ ID NO: 38476 - DNA, 32 bp, Artificial; identical to SEQ ID NO: 5185
  oligonucleotide probe

SEQ ID NO: 38477 - DNA, 32 bp, Artificial; identical to SEQ ID NO: 5185
  oligonucleotide probe

SEQ ID NO: 38478 - DNA, 32 bp, Artificial; identical to SEQ ID NO: 5134
  oligonucleotide probe

SEQ ID NO: 38479 - DNA, 32 bp, Artificial; identical to SEQ ID NO: 5134
  oligonucleotide probe

SEQ ID NO: 38480 - DNA, 32 bp, Artificial; identical to SEQ ID NO: 5138
  oligonucleotide probe

SEQ ID NO: 38481 - DNA, 32 bp, Artificial; identical to SEQ ID NO: 5138
  oligonucleotide probe

SEQ ID NO: 38482 - DNA, 32 bp, Artificial; identical to SEQ ID NO: 5133
  oligonucleotide probe

SEQ ID NO: 38483 - DNA, 32 bp, Artificial; identical to SEQ ID NO: 5133
  oligonucleotide probe

SEQ ID NO: 38484 - DNA, 32 bp, Artificial; identical to SEQ ID NO: 5137
  oligonucleotide probe

SEQ ID NO: 38485 - DNA, 32 bp, Artificial; identical to SEQ ID NO: 5137
  oligonucleotide probe

SEQ ID NO: 38486 - DNA, 32 bp, Artificial; identical to SEQ ID NO: 5159
  oligonucleotide probe

SEQ ID NO: 38487 - DNA, 32 bp, Artificial; identical to SEQ ID NO: 5159
  oligonucleotide probe

SEQ ID NO: 38488 - DNA, 32 bp, Artificial; identical to SEQ ID NO: 5163
  oligonucleotide probe

SEQ ID NO: 38489 - DNA, 32 bp, Artificial; identical to SEQ ID NO: 5163
  oligonucleotide probe

SEQ ID NO: 38490 - DNA, 32 bp, Artificial; identical to SEQ ID NO: 5171
  oligonucleotide probe

SEQ ID NO: 38491 - DNA, 32 bp, Artificial; identical to SEQ ID NO: 5171
  oligonucleotide probe

SEQ ID NO: 38492 - DNA, 32 bp, Artificial; identical to SEQ ID NO: 5399
  oligonucleotide probe

SEQ ID NO: 38493 - DNA, 32 bp, Artificial; identical to SEQ ID NO: 5399
  oligonucleotide probe

SEQ ID NO: 38494 - DNA, 32 bp, Artificial; identical to SEQ ID NO: 5239
  oligonucleotide probe

SEQ ID NO: 38495 - DNA, 32 bp, Artificial; identical to SEQ ID NO: 5239
  oligonucleotide probe

SEQ ID NO: 38496 - DNA, 32 bp, Artificial; identical to SEQ ID NO: 5163
  oligonucleotide probe

SEQ ID NO: 38497 - DNA, 32 bp, Artificial; identical to SEQ ID NO: 5163
  oligonucleotide probe

SEQ ID NO: 38498 - DNA, 32 bp, Artificial; identical to SEQ ID NO: 5410
  oligonucleotide probe

SEQ ID NO: 38499 - DNA, 32 bp, Artificial; identical to SEQ ID NO: 5410
  oligonucleotide probe

SEQ ID NO: 38500 - DNA, 32 bp, Artificial; identical to SEQ ID NO: 5163
  oligonucleotide probe

SEQ ID NO: 38501 - DNA, 32 bp, Artificial; identical to SEQ ID NO: 5163
  oligonucleotide probe

SEQ ID NO: 38502 - DNA, 32 bp, Artificial; identical to SEQ ID NO: 5137
  oligonucleotide probe

SEQ ID NO: 38503 - DNA, 32 bp, Artificial; identical to SEQ ID NO: 5137
  oligonucleotide probe

SEQ ID NO: 38504 - DNA, 32 bp, Artificial; identical to SEQ ID NO: 5232
  oligonucleotide probe

SEQ ID NO: 38505 - DNA, 32 bp, Artificial; identical to SEQ ID NO: 5232
  oligonucleotide probe

SEQ ID NO: 38506 - DNA, 32 bp, Artificial; identical to SEQ ID NO: 5171
  oligonucleotide probe

SEQ ID NO: 38507 - DNA, 32 bp, Artificial; identical to SEQ ID NO: 5171
  oligonucleotide probe

SEQ ID NO: 38508 - DNA, 32 bp, Artificial; identical to SEQ ID NO: 5554
  oligonucleotide probe

SEQ ID NO: 38509 - DNA, 32 bp, Artificial; identical to SEQ ID NO: 5554
  oligonucleotide probe

SEQ ID NO: 38510 - DNA, 32 bp, Artificial; identical to SEQ ID NO: 5416
  oligonucleotide probe

SEQ ID NO: 38511 - DNA, 32 bp, Artificial; identical to SEQ ID NO: 5416
  oligonucleotide probe

SEQ ID NO: 38512 - DNA, 32 bp, Artificial; identical to SEQ ID NO: 5140
  oligonucleotide probe

SEQ ID NO: 38513 - DNA, 32 bp, Artificial; identical to SEQ ID NO: 5140
  oligonucleotide probe

SEQ ID NO: 38514 - DNA, 32 bp, Artificial; identical to SEQ ID NO: 5141
  oligonucleotide probe

SEQ ID NO: 38515 - DNA, 32 bp, Artificial; identical to SEQ ID NO: 5141
  oligonucleotide probe

SEQ ID NO: 38516 - DNA, 32 bp, Artificial; identical to SEQ ID NO: 5195
  oligonucleotide probe

SEQ ID NO: 38517 - DNA, 32 bp, Artificial; identical to SEQ ID NO: 5195
  oligonucleotide probe

SEQ ID NO: 38518 - DNA, 32 bp, Artificial; identical to SEQ ID NO: 5416
  oligonucleotide probe

SEQ ID NO: 38519 - DNA, 32 bp, Artificial; identical to SEQ ID NO: 5416
  oligonucleotide probe

SEQ ID NO: 38520 - DNA, 32 bp, Artificial; identical to SEQ ID NO: 5161
  oligonucleotide probe

SEQ ID NO: 38521 - DNA, 32 bp, Artificial; identical to SEQ ID NO: 5161
  oligonucleotide probe

SEQ ID NO: 38522 - DNA, 32 bp, Artificial; identical to SEQ ID NO: 5137
  oligonucleotide probe

SEQ ID NO: 38523 - DNA, 32 bp, Artificial; identical to SEQ ID NO: 5137
  oligonucleotide probe

SEQ ID NO: 38524 - DNA, 32 bp, Artificial; identical to SEQ ID NO: 5160
  oligonucleotide probe

SEQ ID NO: 38525 - DNA, 32 bp, Artificial; identical to SEQ ID NO: 5160
  oligonucleotide probe

SEQ ID NO: 38526 - DNA, 32 bp, Artificial; identical to SEQ ID NO: 5185
  oligonucleotide probe

SEQ ID NO: 38527 - DNA, 32 bp, Artificial; identical to SEQ ID NO: 5185
  oligonucleotide probe

SEQ ID NO: 38528 - DNA, 32 bp, Artificial; identical to SEQ ID NO: 5140
  oligonucleotide probe

SEQ ID NO: 38529 - DNA, 32 bp, Artificial; identical to SEQ ID NO: 5140
  oligonucleotide probe

SEQ ID NO: 38530 - DNA, 32 bp, Artificial; identical to SEQ ID NO: 5177
  oligonucleotide probe

SEQ ID NO: 38531 - DNA, 32 bp, Artificial; identical to SEQ ID NO: 5177
  oligonucleotide probe

SEQ ID NO: 38532 - DNA, 32 bp, Artificial; identical to SEQ ID NO: 5224
  oligonucleotide probe

SEQ ID NO: 38533 - DNA, 32 bp, Artificial; identical to SEQ ID NO: 5224
  oligonucleotide probe

SEQ ID NO: 38534 - DNA, 32 bp, Artificial; identical to SEQ ID NO: 5177
  oligonucleotide probe

SEQ ID NO: 38535 - DNA, 32 bp, Artificial; identical to SEQ ID NO: 5177
  oligonucleotide probe

SEQ ID NO: 38536 - DNA, 32 bp, Artificial; identical to SEQ ID NO: 5140
  oligonucleotide probe

SEQ ID NO: 38537 - DNA, 32 bp, Artificial; identical to SEQ ID NO: 5140
  oligonucleotide probe

SEQ ID NO: 38538 - DNA, 32 bp, Artificial; identical to SEQ ID NO: 5221
  oligonucleotide probe

SEQ ID NO: 38539 - DNA, 32 bp, Artificial; identical to SEQ ID NO: 5221
  oligonucleotide probe

SEQ ID NO: 38540 - DNA, 32 bp, Artificial; identical to SEQ ID NO: 5239
  oligonucleotide probe

SEQ ID NO: 38541 - DNA, 32 bp, Artificial; identical to SEQ ID NO: 5239
  oligonucleotide probe

SEQ ID NO: 38542 - DNA, 32 bp, Artificial; identical to SEQ ID NO: 5171
  oligonucleotide probe

SEQ ID NO: 38543 - DNA, 32 bp, Artificial; identical to SEQ ID NO: 5171
  oligonucleotide probe

SEQ ID NO: 38544 - DNA, 32 bp, Artificial; identical to SEQ ID NO: 5195
  oligonucleotide probe

SEQ ID NO: 38545 - DNA, 32 bp, Artificial; identical to SEQ ID NO: 5195
  oligonucleotide probe

SEQ ID NO: 38546 - DNA, 32 bp, Artificial; identical to SEQ ID NO: 5185
  oligonucleotide probe

SEQ ID NO: 38547 - DNA, 32 bp, Artificial; identical to SEQ ID NO: 5185
  oligonucleotide probe

SEQ ID NO: 38548 - DNA, 32 bp, Artificial; identical to SEQ ID NO: 5185
  oligonucleotide probe

SEQ ID NO: 38549 - DNA, 32 bp, Artificial; identical to SEQ ID NO: 5185
  oligonucleotide probe

SEQ ID NO: 38550 - DNA, 32 bp, Artificial; identical to SEQ ID NO: 5134
  oligonucleotide probe

SEQ ID NO: 38551 - DNA, 32 bp, Artificial; identical to SEQ ID NO: 5134
  oligonucleotide probe

SEQ ID NO: 38552 - DNA, 32 bp, Artificial; identical to SEQ ID NO: 5242
  oligonucleotide probe

SEQ ID NO: 38553 - DNA, 32 bp, Artificial; identical to SEQ ID NO: 5242
  oligonucleotide probe

SEQ ID NO: 38554 - DNA, 32 bp, Artificial; identical to SEQ ID NO: 5136
  oligonucleotide probe

SEQ ID NO: 38555 - DNA, 32 bp, Artificial; identical to SEQ ID NO: 5136
  oligonucleotide probe

SEQ ID NO: 38556 - DNA, 32 bp, Artificial; identical to SEQ ID NO: 5160
  oligonucleotide probe

SEQ ID NO: 38557 - DNA, 32 bp, Artificial; identical to SEQ ID NO: 5160
  oligonucleotide probe

SEQ ID NO: 38558 - DNA, 32 bp, Artificial; identical to SEQ ID NO: 5231
  oligonucleotide probe

SEQ ID NO: 38559 - DNA, 32 bp, Artificial; identical to SEQ ID NO: 5231
  oligonucleotide probe

SEQ ID NO: 38560 - DNA, 32 bp, Artificial; identical to SEQ ID NO: 5223
  oligonucleotide probe

SEQ ID NO: 38561 - DNA, 32 bp, Artificial; identical to SEQ ID NO: 5223
  oligonucleotide probe

SEQ ID NO: 38562 - DNA, 32 bp, Artificial; identical to SEQ ID NO: 5416
  oligonucleotide probe

SEQ ID NO: 38563 - DNA, 32 bp, Artificial; identical to SEQ ID NO: 5416
  oligonucleotide probe

SEQ ID NO: 38564 - DNA, 32 bp, Artificial; identical to SEQ ID NO: 5134
  oligonucleotide probe

SEQ ID NO: 38565 - DNA, 32 bp, Artificial; identical to SEQ ID NO: 5134
  oligonucleotide probe

SEQ ID NO: 38566 - DNA, 32 bp, Artificial; identical to SEQ ID NO: 5137
  oligonucleotide probe

SEQ ID NO: 38567 - DNA, 32 bp, Artificial; identical to SEQ ID NO: 5137
  oligonucleotide probe

SEQ ID NO: 38568 - DNA, 32 bp, Artificial; identical to SEQ ID NO: 5185
  oligonucleotide probe

SEQ ID NO: 38569 - DNA, 32 bp, Artificial; identical to SEQ ID NO: 5185
  oligonucleotide probe

SEQ ID NO: 38570 - DNA, 32 bp, Artificial; identical to SEQ ID NO: 5159
  oligonucleotide probe

SEQ ID NO: 38571 - DNA, 32 bp, Artificial; identical to SEQ ID NO: 5159
  oligonucleotide probe

SEQ ID NO: 38572 - DNA, 32 bp, Artificial; identical to SEQ ID NO: 5138
  oligonucleotide probe

SEQ ID NO: 38573 - DNA, 32 bp, Artificial; identical to SEQ ID NO: 5138
  oligonucleotide probe

SEQ ID NO: 38574 - DNA, 32 bp, Artificial; identical to SEQ ID NO: 5160
  oligonucleotide probe

SEQ ID NO: 38575 - DNA, 32 bp, Artificial; identical to SEQ ID NO: 5160
  oligonucleotide probe

SEQ ID NO: 38576 - DNA, 32 bp, Artificial; identical to SEQ ID NO: 5159
  oligonucleotide probe

SEQ ID NO: 38577 - DNA, 32 bp, Artificial; identical to SEQ ID NO: 5159
  oligonucleotide probe

SEQ ID NO: 38578 - DNA, 32 bp, Artificial; identical to SEQ ID NO: 5171
  oligonucleotide probe

SEQ ID NO: 38579 - DNA, 32 bp, Artificial; identical to SEQ ID NO: 5171
  oligonucleotide probe

SEQ ID NO: 38580 - DNA, 32 bp, Artificial; identical to SEQ ID NO: 5411
  oligonucleotide probe

SEQ ID NO: 38581 - DNA, 32 bp, Artificial; identical to SEQ ID NO: 5411
  oligonucleotide probe

SEQ ID NO: 38582 - DNA, 32 bp, Artificial; identical to SEQ ID NO: 5416
  oligonucleotide probe

SEQ ID NO: 38583 - DNA, 32 bp, Artificial; identical to SEQ ID NO: 5416
  oligonucleotide probe

SEQ ID NO: 38584 - DNA, 32 bp, Artificial; identical to SEQ ID NO: 5708
  oligonucleotide probe

SEQ ID NO: 38585 - DNA, 32 bp, Artificial; identical to SEQ ID NO: 5708
  oligonucleotide probe

SEQ ID NO: 38586 - DNA, 32 bp, Artificial; identical to SEQ ID NO: 5161
  oligonucleotide probe

SEQ ID NO: 38587 - DNA, 32 bp, Artificial; identical to SEQ ID NO: 5161
  oligonucleotide probe

SEQ ID NO: 38588 - DNA, 32 bp, Artificial; identical to SEQ ID NO: 5410
  oligonucleotide probe

SEQ ID NO: 38589 - DNA, 32 bp, Artificial; identical to SEQ ID NO: 5410
  oligonucleotide probe

SEQ ID NO: 38590 - DNA, 32 bp, Artificial; identical to SEQ ID NO: 5536
  oligonucleotide probe

SEQ ID NO: 38591 - DNA, 32 bp, Artificial; identical to SEQ ID NO: 5536
  oligonucleotide probe

SEQ ID NO: 38592 - DNA, 32 bp, Artificial; identical to SEQ ID NO: 6131
  oligonucleotide probe

SEQ ID NO: 38593 - DNA, 32 bp, Artificial; identical to SEQ ID NO: 6131
  oligonucleotide probe

SEQ ID NO: 38594 - DNA, 32 bp, Artificial; identical to SEQ ID NO: 5550
  oligonucleotide probe

SEQ ID NO: 38595 - DNA, 32 bp, Artificial; identical to SEQ ID NO: 5550
  oligonucleotide probe

SEQ ID NO: 38596 - DNA, 32 bp, Artificial; identical to SEQ ID NO: 5536
  oligonucleotide probe

SEQ ID NO: 38597 - DNA, 32 bp, Artificial; identical to SEQ ID NO: 5536
  oligonucleotide probe

SEQ ID NO: 38598 - DNA, 32 bp, Artificial; identical to SEQ ID NO: 6145
  oligonucleotide probe

SEQ ID NO: 38599 - DNA, 32 bp, Artificial; identical to SEQ ID NO: 6145
  oligonucleotide probe

SEQ ID NO: 38600 - DNA, 32 bp, Artificial; identical to SEQ ID NO: 6145
  oligonucleotide probe

SEQ ID NO: 38601 - DNA, 32 bp, Artificial; identical to SEQ ID NO: 6145
  oligonucleotide probe

SEQ ID NO: 38602 - DNA, 32 bp, Artificial; identical to SEQ ID NO: 5708
  oligonucleotide probe

SEQ ID NO: 38603 - DNA, 32 bp, Artificial; identical to SEQ ID NO: 5708
  oligonucleotide probe

SEQ ID NO: 38604 - DNA, 32 bp, Artificial; identical to SEQ ID NO: 5594
  oligonucleotide probe

SEQ ID NO: 38605 - DNA, 32 bp, Artificial; identical to SEQ ID NO: 5594
  oligonucleotide probe

SEQ ID NO: 38606 - DNA, 32 bp, Artificial; identical to SEQ ID NO: 5610
  oligonucleotide probe

SEQ ID NO: 38607 - DNA, 32 bp, Artificial; identical to SEQ ID NO: 5610
  oligonucleotide probe

SEQ ID NO: 38608 - DNA, 32 bp, Artificial; identical to SEQ ID NO: 5536
  oligonucleotide probe

SEQ ID NO: 38609 - DNA, 32 bp, Artificial; identical to SEQ ID NO: 5536
  oligonucleotide probe

SEQ ID NO: 38610 - DNA, 32 bp, Artificial; identical to SEQ ID NO: 5538
  oligonucleotide probe

SEQ ID NO: 38611 - DNA, 32 bp, Artificial; identical to SEQ ID NO: 5538
  oligonucleotide probe

SEQ ID NO: 38612 - DNA, 32 bp, Artificial; identical to SEQ ID NO: 5564
  oligonucleotide probe

SEQ ID NO: 38613 - DNA, 32 bp, Artificial; identical to SEQ ID NO: 5540
  oligonucleotide probe

SEQ ID NO: 38614 - DNA, 32 bp, Artificial; identical to SEQ ID NO: 5546
  oligonucleotide probe

SEQ ID NO: 38615 - DNA, 32 bp, Artificial; identical to SEQ ID NO: 5547
  oligonucleotide probe

SEQ ID NO: 38616 - DNA, 32 bp, Artificial; identical to SEQ ID NO: 5547
  oligonucleotide probe

SEQ ID NO: 38617 - DNA, 32 bp, Artificial; identical to SEQ ID NO: 5595
  oligonucleotide probe

SEQ ID NO: 38618 - DNA, 32 bp, Artificial; identical to SEQ ID NO: 5595
  oligonucleotide probe

SEQ ID NO: 38619 - DNA, 32 bp, Artificial; identical to SEQ ID NO: 5141
  oligonucleotide probe

SEQ ID NO: 38620 - DNA, 32 bp, Artificial; identical to SEQ ID NO: 5141
  oligonucleotide probe

SEQ ID NO: 38621 - DNA, 32 bp, Artificial; identical to SEQ ID NO: 5540
  oligonucleotide probe

SEQ ID NO: 38622 - DNA, 32 bp, Artificial; identical to SEQ ID NO: 5540
  oligonucleotide probe

SEQ ID NO: 38623 - DNA, 32 bp, Artificial; identical to SEQ ID NO: 5611
  oligonucleotide probe

SEQ ID NO: 38624 - DNA, 32 bp, Artificial; identical to SEQ ID NO: 5611
  oligonucleotide probe

SEQ ID NO: 38625 - DNA, 32 bp, Artificial; identical to SEQ ID NO: 5221
  oligonucleotide probe

SEQ ID NO: 38626 - DNA, 32 bp, Artificial; identical to SEQ ID NO: 5221
  oligonucleotide probe

SEQ ID NO: 38627 - DNA, 32 bp, Artificial; identical to SEQ ID NO: 5584
  oligonucleotide probe

SEQ ID NO: 38628 - DNA, 32 bp, Artificial; identical to SEQ ID NO: 5584
  oligonucleotide probe

SEQ ID NO: 38629 - DNA, 32 bp, Artificial; identical to SEQ ID NO: 5550
  oligonucleotide probe

SEQ ID NO: 38630 - DNA, 32 bp, Artificial; identical to SEQ ID NO: 5550
  oligonucleotide probe

SEQ ID NO: 38631 - DNA, 32 bp, Artificial; identical to SEQ ID NO: 5224
  oligonucleotide probe

SEQ ID NO: 38632 - DNA, 32 bp, Artificial; identical to SEQ ID NO: 5224
  oligonucleotide probe

SEQ ID NO: 38633 - DNA, 32 bp, Artificial; identical to SEQ ID NO: 5540
  oligonucleotide probe

SEQ ID NO: 38634 - DNA, 32 bp, Artificial; identical to SEQ ID NO: 5540
  oligonucleotide probe

SEQ ID NO: 38635 - DNA, 32 bp, Artificial; identical to SEQ ID NO: 5545
  oligonucleotide probe

SEQ ID NO: 38636 - DNA, 32 bp, Artificial; identical to SEQ ID NO: 5545
  oligonucleotide probe

SEQ ID NO: 38637 - DNA, 32 bp, Artificial; identical to SEQ ID NO: 5610
  oligonucleotide probe

SEQ ID NO: 38638 - DNA, 32 bp, Artificial; identical to SEQ ID NO: 5610
  oligonucleotide probe

SEQ ID NO: 38639 - DNA, 32 bp, Artificial; identical to SEQ ID NO: 5564
  oligonucleotide probe

SEQ ID NO: 38640 - DNA, 32 bp, Artificial; identical to SEQ ID NO: 5564
  oligonucleotide probe

SEQ ID NO: 38641 - DNA, 32 bp, Artificial; identical to SEQ ID NO: 5555
  oligonucleotide probe

SEQ ID NO: 38642 - DNA, 32 bp, Artificial; identical to SEQ ID NO: 5555
  oligonucleotide probe

SEQ ID NO: 38643 - DNA, 32 bp, Artificial; identical to SEQ ID NO: 5585
  oligonucleotide probe

SEQ ID NO: 38644 - DNA, 32 bp, Artificial; identical to SEQ ID NO: 5585
  oligonucleotide probe

SEQ ID NO: 38645 - DNA, 32 bp, Artificial; identical to SEQ ID NO: 5539
  oligonucleotide probe

SEQ ID NO: 38646 - DNA, 32 bp, Artificial; identical to SEQ ID NO: 5539
  oligonucleotide probe

SEQ ID NO: 38647 - DNA, 32 bp, Artificial; identical to SEQ ID NO: 5541
  oligonucleotide probe

SEQ ID NO: 38648 - DNA, 32 bp, Artificial; identical to SEQ ID NO: 5541
  oligonucleotide probe

SEQ ID NO: 38649 - DNA, 32 bp, Artificial; identical to SEQ ID NO: 5538
  oligonucleotide probe

SEQ ID NO: 38650 - DNA, 32 bp, Artificial; identical to SEQ ID NO: 5538
  oligonucleotide probe

SEQ ID NO: 38651 - DNA, 32 bp, Artificial; identical to SEQ ID NO: 5411
  oligonucleotide probe

SEQ ID NO: 38652 - DNA, 32 bp, Artificial; identical to SEQ ID NO: 5411
  oligonucleotide probe

SEQ ID NO: 38653 - DNA, 32 bp, Artificial; identical to SEQ ID NO: 6145
  oligonucleotide probe

SEQ ID NO: 38654 - DNA, 32 bp, Artificial; identical to SEQ ID NO: 6145
  oligonucleotide probe

SEQ ID NO: 38655 - DNA, 32 bp, Artificial; identical to SEQ ID NO: 5232
  oligonucleotide probe

SEQ ID NO: 38656 - DNA, 32 bp, Artificial; identical to SEQ ID NO: 5232
  oligonucleotide probe

SEQ ID NO: 38657 - DNA, 32 bp, Artificial; identical to SEQ ID NO: 5242
  oligonucleotide probe

SEQ ID NO: 38658 - DNA, 32 bp, Artificial; identical to SEQ ID NO: 5242
  oligonucleotide probe

SEQ ID NO: 38659 - DNA, 32 bp, Artificial; identical to SEQ ID NO: 5554
  oligonucleotide probe

SEQ ID NO: 38660 - DNA, 32 bp, Artificial; identical to SEQ ID NO: 5554
  oligonucleotide probe

SEQ ID NO: 38661 - DNA, 32 bp, Artificial; identical to SEQ ID NO: 5594
  oligonucleotide probe

SEQ ID NO: 38662 - DNA, 32 bp, Artificial; identical to SEQ ID NO: 5594
  oligonucleotide probe

SEQ ID NO: 38663 - DNA, 32 bp, Artificial; identical to SEQ ID NO: 5594
  oligonucleotide probe

SEQ ID NO: 38664 - DNA, 32 bp, Artificial; identical to SEQ ID NO: 5594
  oligonucleotide probe

SEQ ID NO: 38665 - DNA, 32 bp, Artificial; identical to SEQ ID NO: 5160
  oligonucleotide probe

SEQ ID NO: 38666 - DNA, 32 bp, Artificial; identical to SEQ ID NO: 5160
  oligonucleotide probe

SEQ ID NO: 38667 - DNA, 32 bp, Artificial; identical to SEQ ID NO: 5550
  oligonucleotide probe

SEQ ID NO: 38668 - DNA, 32 bp, Artificial; identical to SEQ ID NO: 5550
  oligonucleotide probe

SEQ ID NO: 38669 - DNA, 32 bp, Artificial; identical to SEQ ID NO: 5536
  oligonucleotide probe

SEQ ID NO: 38670 - DNA, 32 bp, Artificial; identical to SEQ ID NO: 5536
  oligonucleotide probe

SEQ ID NO: 38671 - DNA, 32 bp, Artificial; identical to SEQ ID NO: 5544
  oligonucleotide probe

SEQ ID NO: 38672 - DNA, 32 bp, Artificial; identical to SEQ ID NO: 5544
  oligonucleotide probe

SEQ ID NO: 38673 - DNA, 32 bp, Artificial; identical to SEQ ID NO: 5611
  oligonucleotide probe

SEQ ID NO: 38674 - DNA, 32 bp, Artificial; identical to SEQ ID NO: 5611
  oligonucleotide probe

SEQ ID NO: 38675 - DNA, 32 bp, Artificial; identical to SEQ ID NO: 6074
  oligonucleotide probe

SEQ ID NO: 38676 - DNA, 32 bp, Artificial; identical to SEQ ID NO: 6074
  oligonucleotide probe

SEQ ID NO: 38677 - DNA, 32 bp, Artificial; identical to SEQ ID NO: 5537
  oligonucleotide probe

SEQ ID NO: 38678 - DNA, 32 bp, Artificial; identical to SEQ ID NO: 5537
  oligonucleotide probe

SEQ ID NO: 38679 - DNA, 32 bp, Artificial; identical to SEQ ID NO: 5136
  oligonucleotide probe

SEQ ID NO: 38680 - DNA, 32 bp, Artificial; identical to SEQ ID NO: 5136
  oligonucleotide probe

SEQ ID NO: 38681 - DNA, 32 bp, Artificial; identical to SEQ ID NO: 5539
  oligonucleotide probe

SEQ ID NO: 38682 - DNA, 32 bp, Artificial; identical to SEQ ID NO: 5539
  oligonucleotide probe

SEQ ID NO: 38683 - DNA, 32 bp, Artificial; identical to SEQ ID NO: 5544
  oligonucleotide probe

SEQ ID NO: 38684 - DNA, 32 bp, Artificial; identical to SEQ ID NO: 5544
  oligonucleotide probe

SEQ ID NO: 38685 - DNA, 32 bp, Artificial; identical to SEQ ID NO: 5171
  oligonucleotide probe

SEQ ID NO: 38686 - DNA, 32 bp, Artificial; identical to SEQ ID NO: 5171
  oligonucleotide probe

SEQ ID NO: 38687 - DNA, 32 bp, Artificial; identical to SEQ ID NO: 5584
  oligonucleotide probe

SEQ ID NO: 38688 - DNA, 32 bp, Artificial; identical to SEQ ID NO: 5584
  oligonucleotide probe

SEQ ID NO: 38689 - DNA, 32 bp, Artificial; identical to SEQ ID NO: 5709
  oligonucleotide probe

SEQ ID NO: 38690 - DNA, 32 bp, Artificial; identical to SEQ ID NO: 5709
  oligonucleotide probe

SEQ ID NO: 38691 - DNA, 32 bp, Artificial; identical to SEQ ID NO: 5544
  oligonucleotide probe

SEQ ID NO: 38692 - DNA, 32 bp, Artificial; identical to SEQ ID NO: 5544
  oligonucleotide probe

SEQ ID NO: 38693 - DNA, 32 bp, Artificial; identical to SEQ ID NO: 5240
  oligonucleotide probe

SEQ ID NO: 38694 - DNA, 32 bp, Artificial; identical to SEQ ID NO: 5240
  oligonucleotide probe

SEQ ID NO: 38695 - DNA, 32 bp, Artificial; identical to SEQ ID NO: 5709
  oligonucleotide probe

SEQ ID NO: 38696 - DNA, 32 bp, Artificial; identical to SEQ ID NO: 5709
  oligonucleotide probe

SEQ ID NO: 38697 - DNA, 32 bp, Artificial; identical to SEQ ID NO: 5231
  oligonucleotide probe

SEQ ID NO: 38698 - DNA, 32 bp, Artificial; identical to SEQ ID NO: 5231
  oligonucleotide probe

SEQ ID NO: 38699 - DNA, 32 bp, Artificial; identical to SEQ ID NO: 5416
  oligonucleotide probe

SEQ ID NO: 38700 - DNA, 32 bp, Artificial; identical to SEQ ID NO: 5416
  oligonucleotide probe

SEQ ID NO: 38701 - DNA, 32 bp, Artificial; identical to SEQ ID NO: 5584
  oligonucleotide probe

SEQ ID NO: 38702 - DNA, 32 bp, Artificial; identical to SEQ ID NO: 5584
  oligonucleotide probe

SEQ ID NO: 38703 - DNA, 32 bp, Artificial; identical to SEQ ID NO: 5595
  oligonucleotide probe

SEQ ID NO: 38704 - DNA, 32 bp, Artificial; identical to SEQ ID NO: 5595
  oligonucleotide probe

SEQ ID NO: 38705 - DNA, 32 bp, Artificial; identical to SEQ ID NO: 5253
  oligonucleotide probe

SEQ ID NO: 38706 - DNA, 32 bp, Artificial; identical to SEQ ID NO: 5253
  oligonucleotide probe

SEQ ID NO: 38707 - DNA, 32 bp, Artificial; identical to SEQ ID NO: 5138
  oligonucleotide probe

SEQ ID NO: 38708 - DNA, 32 bp, Artificial; identical to SEQ ID NO: 5138
  oligonucleotide probe

SEQ ID NO: 38709 - DNA, 32 bp, Artificial; identical to SEQ ID NO: 6070
  oligonucleotide probe

SEQ ID NO: 38710 - DNA, 32 bp, Artificial; identical to SEQ ID NO: 6070
  oligonucleotide probe

SEQ ID NO: 38711 - DNA, 32 bp, Artificial; identical to SEQ ID NO: 5565
  oligonucleotide probe

SEQ ID NO: 38712 - DNA, 32 bp, Artificial; identical to SEQ ID NO: 5565
  oligonucleotide probe

SEQ ID NO: 38713 - DNA, 32 bp, Artificial; identical to SEQ ID NO: 5410
  oligonucleotide probe

SEQ ID NO: 38714 - DNA, 32 bp, Artificial; identical to SEQ ID NO: 5410
  oligonucleotide probe

SEQ ID NO: 38715 - DNA, 32 bp, Artificial; identical to SEQ ID NO: 5135
  oligonucleotide probe

SEQ ID NO: 38716 - DNA, 32 bp, Artificial; identical to SEQ ID NO: 5135
  oligonucleotide probe

SEQ ID NO: 38717 - DNA, 32 bp, Artificial; identical to SEQ ID NO: 5546
  oligonucleotide probe

SEQ ID NO: 38718 - DNA, 32 bp, Artificial; identical to SEQ ID NO: 5546
  oligonucleotide probe

SEQ ID NO: 38719 - DNA, 32 bp, Artificial; identical to SEQ ID NO: 5539
  oligonucleotide probe

SEQ ID NO: 38720 - DNA, 32 bp, Artificial; identical to SEQ ID NO: 5539
  oligonucleotide probe

SEQ ID NO: 38721 - DNA, 32 bp, Artificial; identical to SEQ ID NO: 5537
  oligonucleotide probe

SEQ ID NO: 38722 - DNA, 32 bp, Artificial; identical to SEQ ID NO: 5537
  oligonucleotide probe

SEQ ID NO: 38723 - DNA, 32 bp, Artificial; identical to SEQ ID NO: 5547
  oligonucleotide probe

SEQ ID NO: 38724 - DNA, 32 bp, Artificial; identical to SEQ ID NO: 5547
  oligonucleotide probe

SEQ ID NO: 38725 - DNA, 32 bp, Artificial; identical to SEQ ID NO: 6070
  oligonucleotide probe

SEQ ID NO: 38726 - DNA, 32 bp, Artificial; identical to SEQ ID NO: 6070
  oligonucleotide probe

SEQ ID NO: 38727 - DNA, 32 bp, Artificial; identical to SEQ ID NO: 5547
  oligonucleotide probe

SEQ ID NO: 38728 - DNA, 32 bp, Artificial; identical to SEQ ID NO: 5547
  oligonucleotide probe

SEQ ID NO: 38729 - DNA, 32 bp, Artificial; identical to SEQ ID NO: 6131
  oligonucleotide probe

SEQ ID NO: 38730 - DNA, 32 bp, Artificial; identical to SEQ ID NO: 6131
  oligonucleotide probe

SEQ ID NO: 38731 - DNA, 32 bp, Artificial; identical to SEQ ID NO: 5564
  oligonucleotide probe

SEQ ID NO: 38732 - DNA, 32 bp, Artificial; identical to SEQ ID NO: 5564
  oligonucleotide probe

SEQ ID NO: 38733 - DNA, 32 bp, Artificial; identical to SEQ ID NO: 6131
  oligonucleotide probe

SEQ ID NO: 38734 - DNA, 32 bp, Artificial; identical to SEQ ID NO: 6131
  oligonucleotide probe

SEQ ID NO: 38735 - DNA, 32 bp, Artificial; identical to SEQ ID NO: 5546
  oligonucleotide probe

SEQ ID NO: 38736 - DNA, 32 bp, Artificial; identical to SEQ ID NO: 5546
  oligonucleotide probe

SEQ ID NO: 38737 - DNA, 32 bp, Artificial; identical to SEQ ID NO: 5594
  oligonucleotide probe

SEQ ID NO: 38738 - DNA, 32 bp, Artificial; identical to SEQ ID NO: 5594
  oligonucleotide probe

SEQ ID NO: 38739 - DNA, 32 bp, Artificial; identical to SEQ ID NO: 5177
  oligonucleotide probe

SEQ ID NO: 38740 - DNA, 32 bp, Artificial; identical to SEQ ID NO: 5177
  oligonucleotide probe

SEQ ID NO: 38741 - DNA, 32 bp, Artificial; identical to SEQ ID NO: 5555
  oligonucleotide probe

SEQ ID NO: 38742 - DNA, 32 bp, Artificial; identical to SEQ ID NO: 5555
  oligonucleotide probe

SEQ ID NO: 38743 - DNA, 32 bp, Artificial; identical to SEQ ID NO: 5159
  oligonucleotide probe

SEQ ID NO: 38744 - DNA, 32 bp, Artificial; identical to SEQ ID NO: 5159
  oligonucleotide probe

SEQ ID NO: 38745 - DNA, 32 bp, Artificial; identical to SEQ ID NO: 5551
  oligonucleotide probe

SEQ ID NO: 38746 - DNA, 32 bp, Artificial; identical to SEQ ID NO: 5551
  oligonucleotide probe

SEQ ID NO: 38747 - DNA, 32 bp, Artificial; identical to SEQ ID NO: 5610
  oligonucleotide probe

SEQ ID NO: 38748 - DNA, 32 bp, Artificial; identical to SEQ ID NO: 5610
  oligonucleotide probe

SEQ ID NO: 38749 - DNA, 32 bp, Artificial; identical to SEQ ID NO: 5708
  oligonucleotide probe

SEQ ID NO: 38750 - DNA, 32 bp, Artificial; identical to SEQ ID NO: 5708
  oligonucleotide probe

SEQ ID NO: 38751 - DNA, 32 bp, Artificial; identical to SEQ ID NO: 6145
  oligonucleotide probe

SEQ ID NO: 38752 - DNA, 32 bp, Artificial; identical to SEQ ID NO: 6145
  oligonucleotide probe

SEQ ID NO: 38753 - DNA, 32 bp, Artificial; identical to SEQ ID NO: 6070
  oligonucleotide probe

SEQ ID NO: 38754 - DNA, 32 bp, Artificial; identical to SEQ ID NO: 6070
  oligonucleotide probe

SEQ ID NO: 38755 - DNA, 32 bp, Artificial; identical to SEQ ID NO: 5585
  oligonucleotide probe

SEQ ID NO: 38756 - DNA, 32 bp, Artificial; identical to SEQ ID NO: 5585
  oligonucleotide probe

SEQ ID NO: 38757 - DNA, 32 bp, Artificial; identical to SEQ ID NO: 5223
  oligonucleotide probe

SEQ ID NO: 38758 - DNA, 32 bp, Artificial; identical to SEQ ID NO: 5223
  oligonucleotide probe

SEQ ID NO: 38759 - DNA, 32 bp, Artificial; identical to SEQ ID NO: 5551
  oligonucleotide probe

SEQ ID NO: 38760 - DNA, 32 bp, Artificial; identical to SEQ ID NO: 5551
  oligonucleotide probe

SEQ ID NO: 38761 - DNA, 32 bp, Artificial; identical to SEQ ID NO: 5163
  oligonucleotide probe

SEQ ID NO: 38762 - DNA, 32 bp, Artificial; identical to SEQ ID NO: 5163
  oligonucleotide probe

SEQ ID NO: 38763 - DNA, 32 bp, Artificial; identical to SEQ ID NO: 5554
  oligonucleotide probe

SEQ ID NO: 38764 - DNA, 32 bp, Artificial; identical to SEQ ID NO: 5554
  oligonucleotide probe

SEQ ID NO: 38765 - DNA, 32 bp, Artificial; identical to SEQ ID NO: 5595
  oligonucleotide probe

SEQ ID NO: 38766 - DNA, 32 bp, Artificial; identical to SEQ ID NO: 5595
  oligonucleotide probe

SEQ ID NO: 38767 - DNA, 32 bp, Artificial; identical to SEQ ID NO: 5554
  oligonucleotide probe

SEQ ID NO: 38768 - DNA, 32 bp, Artificial; identical to SEQ ID NO: 5554
  oligonucleotide probe

SEQ ID NO: 38769 - DNA, 32 bp, Artificial; identical to SEQ ID NO: 5541
  oligonucleotide probe

SEQ ID NO: 38770 - DNA, 32 bp, Artificial; identical to SEQ ID NO: 5541
  oligonucleotide probe

SEQ ID NO: 38771 - DNA, 32 bp, Artificial; identical to SEQ ID NO: 5538
  oligonucleotide probe

SEQ ID NO: 38772 - DNA, 32 bp, Artificial; identical to SEQ ID NO: 5538
  oligonucleotide probe

SEQ ID NO: 38773 - DNA, 32 bp, Artificial; identical to SEQ ID NO: 5218
  oligonucleotide probe

SEQ ID NO: 38774 - DNA, 32 bp, Artificial; identical to SEQ ID NO: 5218
  oligonucleotide probe

SEQ ID NO: 38775 - DNA, 32 bp, Artificial; identical to SEQ ID NO: 5133
  oligonucleotide probe

SEQ ID NO: 38776 - DNA, 32 bp, Artificial; identical to SEQ ID NO: 5133
  oligonucleotide probe

SEQ ID NO: 38777 - DNA, 32 bp, Artificial; identical to SEQ ID NO: 5134
  oligonucleotide probe

SEQ ID NO: 38778 - DNA, 32 bp, Artificial; identical to SEQ ID NO: 5134
  oligonucleotide probe

SEQ ID NO: 38779 - DNA, 32 bp, Artificial; identical to SEQ ID NO: 5536
  oligonucleotide probe

SEQ ID NO: 38780 - DNA, 32 bp, Artificial; identical to SEQ ID NO: 5536
  oligonucleotide probe

SEQ ID NO: 38781 - DNA, 32 bp, Artificial; identical to SEQ ID NO: 5541
  oligonucleotide probe

SEQ ID NO: 38782 - DNA, 32 bp, Artificial; identical to SEQ ID NO: 5541
  oligonucleotide probe

SEQ ID NO: 38783 - DNA, 32 bp, Artificial; identical to SEQ ID NO: 5550
  oligonucleotide probe

SEQ ID NO: 38784 - DNA, 32 bp, Artificial; identical to SEQ ID NO: 5550
  oligonucleotide probe

SEQ ID NO: 38785 - DNA, 32 bp, Artificial; identical to SEQ ID NO: 5220
  oligonucleotide probe

SEQ ID NO: 38786 - DNA, 32 bp, Artificial; identical to SEQ ID NO: 5220
  oligonucleotide probe

SEQ ID NO: 38787 - DNA, 32 bp, Artificial; identical to SEQ ID NO: 5565
  oligonucleotide probe

SEQ ID NO: 38788 - DNA, 32 bp, Artificial; identical to SEQ ID NO: 5565
  oligonucleotide probe

SEQ ID NO: 38789 - DNA, 32 bp, Artificial; identical to SEQ ID NO: 5585
  oligonucleotide probe

SEQ ID NO: 38790 - DNA, 32 bp, Artificial; identical to SEQ ID NO: 5585
  oligonucleotide probe

SEQ ID NO: 38791 - DNA, 32 bp, Artificial; identical to SEQ ID NO: 5551
  oligonucleotide probe

SEQ ID NO: 38792 - DNA, 32 bp, Artificial; identical to SEQ ID NO: 5551
  oligonucleotide probe

SEQ ID NO: 38793 - DNA, 32 bp, Artificial; identical to SEQ ID NO: 5536
  oligonucleotide probe

SEQ ID NO: 38794 - DNA, 32 bp, Artificial; identical to SEQ ID NO: 5536
  oligonucleotide probe

SEQ ID NO: 38795 - DNA, 32 bp, Artificial; identical to SEQ ID NO: 5241
  oligonucleotide probe

SEQ ID NO: 38796 - DNA, 32 bp, Artificial; identical to SEQ ID NO: 5241
  oligonucleotide probe

SEQ ID NO: 38797 - DNA, 32 bp, Artificial; identical to SEQ ID NO: 5537
  oligonucleotide probe

SEQ ID NO: 38798 - DNA, 32 bp, Artificial; identical to SEQ ID NO: 5537
  oligonucleotide probe

SEQ ID NO: 38799 - DNA, 32 bp, Artificial; identical to SEQ ID NO: 5565
  oligonucleotide probe

SEQ ID NO: 38800 - DNA, 32 bp, Artificial; identical to SEQ ID NO: 5565
  oligonucleotide probe

SEQ ID NO: 38801 - DNA, 32 bp, Artificial; identical to SEQ ID NO: 5140
  oligonucleotide probe

SEQ ID NO: 38802 - DNA, 32 bp, Artificial; identical to SEQ ID NO: 5140
  oligonucleotide probe

SEQ ID NO: 38803 - DNA, 32 bp, Artificial; identical to SEQ ID NO: 5229
  oligonucleotide probe

SEQ ID NO: 38804 - DNA, 32 bp, Artificial; identical to SEQ ID NO: 5229
  oligonucleotide probe

SEQ ID NO: 38805 - DNA, 32 bp, Artificial; identical to SEQ ID NO: 5709
  oligonucleotide probe

SEQ ID NO: 38806 - DNA, 32 bp, Artificial; identical to SEQ ID NO: 5709
  oligonucleotide probe

SEQ ID NO: 38807 - DNA, 32 bp, Artificial; identical to SEQ ID NO: 5540
  oligonucleotide probe

SEQ ID NO: 38808 - DNA, 32 bp, Artificial; identical to SEQ ID NO: 5540
  oligonucleotide probe

SEQ ID NO: 38809 - DNA, 32 bp, Artificial; identical to SEQ ID NO: 5708
  oligonucleotide probe

SEQ ID NO: 38810 - DNA, 32 bp, Artificial; identical to SEQ ID NO: 5708
  oligonucleotide probe

SEQ ID NO: 38811 - DNA, 32 bp, Artificial; identical to SEQ ID NO: 5222
  oligonucleotide probe

SEQ ID NO: 38812 - DNA, 32 bp, Artificial; identical to SEQ ID NO: 5222
  oligonucleotide probe

SEQ ID NO: 38813 - DNA, 32 bp, Artificial; identical to SEQ ID NO: 5219
  oligonucleotide probe

SEQ ID NO: 38814 - DNA, 32 bp, Artificial; identical to SEQ ID NO: 5219
  oligonucleotide probe

SEQ ID NO: 38815 - DNA, 32 bp, Artificial; identical to SEQ ID NO: 6131
  oligonucleotide probe

SEQ ID NO: 38816 - DNA, 32 bp, Artificial; identical to SEQ ID NO: 6131
  oligonucleotide probe

SEQ ID NO: 38817 - DNA, 32 bp, Artificial; identical to SEQ ID NO: 5545
  oligonucleotide probe

SEQ ID NO: 38818 - DNA, 32 bp, Artificial; identical to SEQ ID NO: 5545
  oligonucleotide probe

SEQ ID NO: 38819 - DNA, 32 bp, Artificial; identical to SEQ ID NO: 5161
  oligonucleotide probe

SEQ ID NO: 38820 - DNA, 32 bp, Artificial; identical to SEQ ID NO: 5161
  oligonucleotide probe

SEQ ID NO: 38821 - DNA, 32 bp, Artificial; identical to SEQ ID NO: 6145
  oligonucleotide probe

SEQ ID NO: 38822 - DNA, 32 bp, Artificial; identical to SEQ ID NO: 6145
  oligonucleotide probe

SEQ ID NO: 38823 - DNA, 32 bp, Artificial; identical to SEQ ID NO: 5137
  oligonucleotide probe

SEQ ID NO: 38824 - DNA, 32 bp, Artificial; identical to SEQ ID NO: 5137
  oligonucleotide probe

SEQ ID NO: 38825 - DNA, 32 bp, Artificial; identical to SEQ ID NO: 6074
  oligonucleotide probe

SEQ ID NO: 38826 - DNA, 32 bp, Artificial; identical to SEQ ID NO: 6074
  oligonucleotide probe

SEQ ID NO: 38827 - DNA, 32 bp, Artificial; identical to SEQ ID NO: 6074
  oligonucleotide probe

SEQ ID NO: 38828 - DNA, 32 bp, Artificial; identical to SEQ ID NO: 6074
  oligonucleotide probe

SEQ ID NO: 38829 - DNA, 32 bp, Artificial; identical to SEQ ID NO: 5217
  oligonucleotide probe

SEQ ID NO: 38830 - DNA, 32 bp, Artificial; identical to SEQ ID NO: 5217
  oligonucleotide probe

SEQ ID NO: 38831 - DNA, 32 bp, Artificial; identical to SEQ ID NO: 5546
  oligonucleotide probe

SEQ ID NO: 38832 - DNA, 32 bp, Artificial; identical to SEQ ID NO: 5546
  oligonucleotide probe

SEQ ID NO: 38833 - DNA, 32 bp, Artificial; identical to SEQ ID NO: 5564
  oligonucleotide probe

SEQ ID NO: 38834 - DNA, 32 bp, Artificial; identical to SEQ ID NO: 5564
  oligonucleotide probe

SEQ ID NO: 38835 - DNA, 32 bp, Artificial; identical to SEQ ID NO: 5545
  oligonucleotide probe

SEQ ID NO: 38836 - DNA, 32 bp, Artificial; identical to SEQ ID NO: 5545
  oligonucleotide probe

SEQ ID NO: 38837 - DNA, 32 bp, Artificial; identical to SEQ ID NO: 5195
  oligonucleotide probe

SEQ ID NO: 38838 - DNA, 32 bp, Artificial; identical to SEQ ID NO: 5195
  oligonucleotide probe

SEQ ID NO: 38839 - DNA, 32 bp, Artificial; identical to SEQ ID NO: 5185
  oligonucleotide probe

SEQ ID NO: 38840 - DNA, 32 bp, Artificial; identical to SEQ ID NO: 5185
  oligonucleotide probe

SEQ ID NO: 38841 - DNA, 32 bp, Artificial; identical to SEQ ID NO: 5399
  oligonucleotide probe

SEQ ID NO: 38842 - DNA, 32 bp, Artificial; identical to SEQ ID NO: 5399
  oligonucleotide probe

SEQ ID NO: 38843 - DNA, 32 bp, Artificial; identical to SEQ ID NO: 5239
  oligonucleotide probe

SEQ ID NO: 38844 - DNA, 32 bp, Artificial; identical to SEQ ID NO: 5239
  oligonucleotide probe

SEQ ID NO: 38845 - DNA, 32 bp, Artificial; identical to SEQ ID NO: 5610
  oligonucleotide probe

SEQ ID NO: 38846 - DNA, 32 bp, Artificial; identical to SEQ ID NO: 5610
  oligonucleotide probe

SEQ ID NO: 38847 - DNA, 32 bp, Artificial; identical to SEQ ID NO: 5555
  oligonucleotide probe

SEQ ID NO: 38848 - DNA, 32 bp, Artificial; identical to SEQ ID NO: 5555
  oligonucleotide probe

SEQ ID NO: 38849 - DNA, 32 bp, Artificial; identical to SEQ ID NO: 5538
  oligonucleotide probe

SEQ ID NO: 38850 - DNA, 32 bp, Artificial; identical to SEQ ID NO: 5538
  oligonucleotide probe

SEQ ID NO: 38851 - DNA, 32 bp, Artificial; identical to SEQ ID NO: 5611
  oligonucleotide probe

SEQ ID NO: 38852 - DNA, 32 bp, Artificial; identical to SEQ ID NO: 5611
  oligonucleotide probe

SEQ ID NO: 38853 - DNA, 32 bp, Artificial; identical to SEQ ID NO: 5708
  oligonucleotide probe

SEQ ID NO: 38854 - DNA, 32 bp, Artificial; identical to SEQ ID NO: 5708
  oligonucleotide probe

SEQ ID NO: 38855 - DNA, 32 bp, Artificial; identical to SEQ ID NO: 5546
  oligonucleotide probe

SEQ ID NO: 38856 - DNA, 32 bp, Artificial; identical to SEQ ID NO: 5546
  oligonucleotide probe

SEQ ID NO: 38857 - DNA, 32 bp, Artificial; identical to SEQ ID NO: 5544
  oligonucleotide probe

SEQ ID NO: 38858 - DNA, 32 bp, Artificial; identical to SEQ ID NO: 5544
  oligonucleotide probe

SEQ ID NO: 38859 - DNA, 32 bp, Artificial; identical to SEQ ID NO: 5544
  oligonucleotide probe

SEQ ID NO: 38860 - DNA, 32 bp, Artificial; identical to SEQ ID NO: 5544
  oligonucleotide probe

SEQ ID NO: 38861 - DNA, 32 bp, Artificial; identical to SEQ ID NO: 5546
  oligonucleotide probe

SEQ ID NO: 38862 - DNA, 32 bp, Artificial; identical to SEQ ID NO: 5546
  oligonucleotide probe

SEQ ID NO: 38863 - DNA, 32 bp, Artificial; identical to SEQ ID NO: 5536
  oligonucleotide probe

SEQ ID NO: 38864 - DNA, 32 bp, Artificial; identical to SEQ ID NO: 5536
  oligonucleotide probe

SEQ ID NO: 38865 - DNA, 32 bp, Artificial; identical to SEQ ID NO: 5537
  oligonucleotide probe

SEQ ID NO: 38866 - DNA, 32 bp, Artificial; identical to SEQ ID NO: 5537
  oligonucleotide probe

SEQ ID NO: 38867 - DNA, 32 bp, Artificial; identical to SEQ ID NO: 5537
  oligonucleotide probe

SEQ ID NO: 38868 - DNA, 32 bp, Artificial; identical to SEQ ID NO: 5537
  oligonucleotide probe

SEQ ID NO: 38869 - DNA, 32 bp, Artificial; identical to SEQ ID NO: 5536
  oligonucleotide probe

SEQ ID NO: 38870 - DNA, 32 bp, Artificial; identical to SEQ ID NO: 5536
  oligonucleotide probe

SEQ ID NO: 38871 - DNA, 32 bp, Artificial; identical to SEQ ID NO: 5585
  oligonucleotide probe

SEQ ID NO: 38872 - DNA, 32 bp, Artificial; identical to SEQ ID NO: 5550
  oligonucleotide probe

SEQ ID NO: 38873 - DNA, 32 bp, Artificial; identical to SEQ ID NO: 5611
  oligonucleotide probe

SEQ ID NO: 38874 - DNA, 32 bp, Artificial; identical to SEQ ID NO: 5555
  oligonucleotide probe

SEQ ID NO: 38875 - DNA, 32 bp, Artificial; identical to SEQ ID NO: 6074
  oligonucleotide probe

SEQ ID NO: 38876 - DNA, 32 bp, Artificial; identical to SEQ ID NO: 5708
  oligonucleotide probe

SEQ ID NO: 38877 - DNA, 32 bp, Artificial; identical to SEQ ID NO: 5541
  oligonucleotide probe

SEQ ID NO: 38878 - DNA, 32 bp, Artificial; identical to SEQ ID NO: 6145
  oligonucleotide probe

SEQ ID NO: 38879 - DNA, 32 bp, Artificial; identical to SEQ ID NO: 5544
  oligonucleotide probe

SEQ ID NO: 38880 - DNA, 32 bp, Artificial; identical to SEQ ID NO: 5565
  oligonucleotide probe

SEQ ID NO: 38881 - DNA, 32 bp, Artificial; identical to SEQ ID NO: 5538
  oligonucleotide probe

SEQ ID NO: 38882 - DNA, 32 bp, Artificial; identical to SEQ ID NO: 5594
  oligonucleotide probe

SEQ ID NO: 38883 - DNA, 72 bp, Artificial
  oligonucleotide probe
ttgaaatccagcgcaaaatctgcgaagccgtgcgcaacgacgcattgcggctttcgcgcattgcggctttcg

SEQ ID NO: 38884 - DNA, 14 bp, Artificial
  oligonucleotide probe
tcgttgcgcacggc

SEQ ID NO: 38885 - DNA, 14 bp, Artificial
  oligonucleotide probe
cgaaagccgcaatg

SEQ ID NO: 38886 - DNA, 14 bp, Artificial
  oligonucleotide probe
tgcgcttgcagccg

SEQ ID NO: 38887 - DNA, 16 bp, Artificial
  oligonucleotide probe
tcgttgcgcacggctt

SEQ ID NO: 38888 - DNA, 29 bp, Artificial
  oligonucleotide probe
attggtttttgattgtaattatttggtgc

SEQ ID NO: 38889 - DNA, 29 bp, Artificial
  oligonucleotide probe
ttgaaatccagcgcaaaatctgcgaagcc

SEQ ID NO: 38890 - DNA, 76 bp, Artificial
  oligonucleotide probe
cgcagattttgcgctggatttcaatgtggtagttggagctggtgaagccgtgcgcaacgacgcattgcggctttcg

SEQ ID NO: 38891 - DNA, 16 bp, Artificial
  oligonucleotide probe
gtgcgctttgcgcgtt

SEQ ID NO: 38892 - DNA, 16 bp, Artificial
  oligonucleotide probe
gtgcgctttgcgcagc

SEQ ID NO: 38893 - DNA, 16 bp, Artificial
  oligonucleotide probe
tgcgcttgcagcgctt

SEQ ID NO: 38894 - DNA, 16 bp, Artificial
  oligonucleotide probe
gtgcgctttgcgcagc

SEQ ID NO: 38895 - DNA, 24 bp, Artificial
  oligonucleotide probe
cgcagattttgcgctggatttcaa
